United States Patent Application Publication US 2026/0337565 A1, published October 29, 2026 (application 19/661,903).

The application's sequence listing, which the Patent Office published only in electronic form, follows.

SEQUENCE LISTING (41948 sequences)

SEQ ID NO: 1 - DNA, 643 bp, synthetic construct
  source 1..643: mol_type = other DNA
tacacgacgctcttccgatctgggactgaactttgagcttcaggcagcacaactcacatttgtgcaaagagctacatgccacatgctgttctccagcctgctgtgtgtatttgtggccttcagctactctggtacacgacgctcttccgatctgggactgaactttgagcttcaggcagcacaactcacatttgtgcaaagagctacatgccacatgctgttctccagcctgctgtgtgtatttgtggccttcagctactctggatcaagtgtggcccagaaggttactcaagcccagtcatcagtatccatgccagtgaggaaagcagtcaccctgaactgcctgtatgaaacaagttggtggtcatattatattttttggtacaagcaacttcccagcaaagagatgattttccttattcgccagggttctgatgaacagaatgcaaaaagtggtcgctattctgtcaacttcaagaaagcagcgaaatccgtcgccttaaccatttcagccttacagctagaagattcagcaaagtacttttgtgctcttggggaactaagtaacaccgacaagctcatctttgggactgggaccagattacaagtctttccaaatatccagaaccctgaccctgccgtt

SEQ ID NO: 2 - DNA, 685 bp, synthetic construct
  source 1..685: mol_type = other DNA
acccacatgaagtgtctaccttctgcagactccaatggctcaggaactgggaatgcagtgccaggctcgtggtatcctgcagcagatgtggggagttttccttctttatgtttccatgaagatgggaggtaatgaagtgtctaccttctgcagactccaatggctcaggaactgggaatgcagtgccaggctcgtggtatcctgcagcagatgtggggagttttccttctttatgtttccatgaagatgggaggcactacaggacaaaacattgaccagcccactgagatgacagctacggaaggtgccattgtccagatcaactgcacgtaccagacatctgggttcaacgggctgttctggtaccagcaacatgctggcgaagcacctacatttctgtcttacaatgttctggatggtttggaggagaaaggtcgtttttcttcattccttagtcggtctaaagggtacagttacctccttttgaaggagctccagatgaaagactctgcctcttacctctgtgctgtgtggaaccaggcaggaactgctctgatctttgggaagggaaccaccttatcagtgagttccaatatccagaaccctgaccctgccgtctgtctcttatacacatctccgagcccacgagacggactcctatctcgtatgccgtcttctgcttgaa

SEQ ID NO: 3 - DNA, 510 bp, synthetic construct
  source 1..510: mol_type = other DNA
tacacgacgtcagatgtgtataagagacattacacgacgctcttccgatctgggggcctgtgactggggggacagaaagactagggattcacccagtaaagagagctcatctgtgactgaggagccttgctccatttcaggtcttctgtgatttggtgaacagtcaacagggagaagaggatcctcaggcctcatccaggagggtgaaaatgccaccatgaactgcagttacaaaactagtataaacaatttacagtggtatagacaaaattcaggtagaggccttgtccacctaattttaatacgttcaaatgaaagagagaaacacagtggaagattaagagtcacgcttgacacttccaagaaaagcagttccttgttgatcacggcttcccgggcagcagacactgcttcttacttctgtgctgcaactaacaccgacaagctcatctttgggactgggaccagattacaagtctttccaaatatccagaaccctgaccctgccgt

SEQ ID NO: 4 - DNA, 563 bp, synthetic construct
  source 1..563: mol_type = other DNA
tccgatctgggcactctgcaggggagcgctgtcagcatgacacgtgttagcttgctgtgggcagtcgtggtctccacctgtctttnnnntataaaggcatctaatggggctgtgaagcaggagggattaacagaacagcaactgaatccggcatggcccagacagtcactcagtctcaaccagagatgtctgtttgcacatatgacaccagtgagagtaattattatttgttcacaaacagcctcccagcaggcagatgattctcgttattcgccaagaagcttataagcaacagaatgcaacggagaatcgtttctctgtgaacttccagaaagcagccaaatccttcagtctcaagatctcagactcacagctgggggacactgcgatgtatttctgtgctttcatgaggtctatcgacatgcgctttggagcagggaccagactgacagtaaaaccaaatatccagaaccctgaccctgccgtctgtctcttatacacatctccgagcccacgagactaggcatgatctcgtatgccgtcttctgcttgaaaaaaaaaaa

SEQ ID NO: 5 - DNA, 732 bp, synthetic construct
  source 1..732: mol_type = other DNA
gacgctcttccgatctggggaggagcttaatgatggagcagaggtgttaaggnaggacagatttcttttatgattcctacagcagaaaaatgagaaacgtttgttattatttttttttcgtgtttaaggtttgaatcctcagtgaaccagggcagaaaagaatgatgaaatccttgagagttttactggtgatcctgtggcttcagttaagctgggtttggagccaacagaaggaggtgtttttttcgtgtttaaggtttgaatcctcagtgaaccagggcagaaaagaatgatgaaatccttgagagttttactggtgatcctgtggcttcagttaagctgggtttggagccaacagaaggaggtggagcaggatcctggaccactcagtgttccagagggagccattgtttctctcaactgcacttacagcaacagtgcttttcaatacttcatgtggtacagacagtattccagaaaaggccctgagttgctgatgtacacatactccagtggtaacaaagaagatggaaggtttacagcacaggtcgataaatccagcaagtatatctccttgttcatcagagactcacagcccagtgattcagccacctacctctgtgcagttagcagctataaattgatcttcgggagtgggaccagactgctggtcaggcctgatatccagaaccctgaccctgccgtntgtctcttatacacatctccgagccc

SEQ ID NO: 6 - DNA, 751 bp, synthetic construct
  source 1..751: mol_type = other DNA
tcagtttcttcttcctgcagctggttgagttctttccagacaaagacaagtgacaagaattagaggtttaaaaagcaaccagattcatctcagcagcttttgtagttttaaataagcaaggagtttctccagcgaaacttcctcacacctcttggtcttggtctcttcagacactttccttcctgttctctggagatcttgcagaaaagagcctgcagtgtttcccttgttcagccatgctcctggagcttatcccactgctggggatacattttgtctacacgacgctcttccgatctgggggcactgctttcactgatagtacattgtttttccaggaactgccagagcccagtcagtgacccagcctgacatccacatcannnncccttatctcttctggtatgtccagtcccccggccaaggcctccagctgctcctgaagtacttttcaggagacactctggttcaaggcattaaaggctttgaggctgaatttaagaggagtcaatcttccttcaatctgaggaaaccctctgtgcattggagtgatgctgctgagtacttctgtgctgtcccgcggaaaaatagcaacacaggcaaactaatctttgggcaagggacaactttacaagtaaaaccagatatccagaaccctgaccctgccgtttgtctcttatacacatctccgagcccacgagaccgaggctgatctcgtatgccgtcttctgcttgaaaaaaaaaaaaaaac

SEQ ID NO: 7 - DNA, 519 bp, synthetic construct
  source 1..519: mol_type = other DNA
tacacgacgctcttccgatctggggagaaagactagggattcacccagtaaagagagctcatctgtgactgaggagccttgctccatttcaggtcttctgtgatttcaataaggaagaagaatggaaactctcctgggagtgtctttgnnnngggtgaacagtcaacagggagaagaggatcctcaggccttgagcatccaggagggtgaaaatgccaccatgaactgcagttacaaaactagtataaacaatttacagtggtatagacaaaattcaggtagaggccttgtccacctaattttaatacgttcaaatgaaagagagaaacacagtggaagattaagagtcacgcttgacacttccaagaaaagcagttccttgttgatcacggcttcccgggcagcagacactgcttcttacttctgtgctacgggtacccgagatggccagaagctgctctttgcaaggggaaccatgttaaaggtggatcttaatatccagaaccctgaccctgccgt

SEQ ID NO: 8 - DNA, 788 bp, synthetic construct
  source 1..788: mol_type = other DNA
ttacacgacgctcttccgatctggtggctgctgctttgttgcttgggacctcctctgacctaggatcagacacagagtctgagttctggggcctggaacctcaatgtgcacttgaacaatgaagttggtgacaagcattactgtactcctatctttgggtntatgggtgatgctaagaccacacagccaaattcaatggagagtaacgaagaagagcctgttcacttgccttgtaaccttggtatcgacagcttccctcccagggtcttacacgacgctcttccgatctgaatgtgcacttgaacaatgaagttggtgacaagcattactgtactcctatctttgggtattatgggtgatgctaagaccacacagccaaattcaatggagagtaacgaagaagagcctgttcacttgccttgtaaccactccacaatcagtggaactgattacatacattggtatcgacagcttccctcccagggtccagagtacgtgattcatggtcttacaagcaatgtgaacaacagaatggcctctctggcaatcgctgaagacagaaagtccagtaccttgatcctgcaccgtgctaccttgagagatgctgctgtgtactactgcatccttctggatagcagctataaattgatcttcgggagtgggaccagactgctggtcaggcctgatatccagaaccctgaccctgccgtctgtctcttatacacatctccgagcccacgagacgtagaggaatctcgtatgccgtcttctgcttgaaaaaaaaaaaa

SEQ ID NO: 9 - DNA, 609 bp, synthetic construct
  source 1..609: mol_type = other DNA
tacacgacgctcttccgatctgggnnnagtttttctgctgtgggtacgtgagcaggaaacatggagaagaatcctttggcagccccattactaatcctctggtttcatcttgactgtacacgacgctcttccgatctggggtttttctgctgtgggtacgtgagcaggaaacatggagaagaatcctttggcagccccattactaatcctctggtttcatcttgactgcgtgagcagcatactgaacgtggaacaaagtcctcagtcactgcatgttcaggagggagacagcaccaatttcacctgcagcttcccttccagcaatttttatgccttacactggtacagatgggaaactgcaaaaagccccgaggccttgtttgtaatgactttaaatggggatgaaaagaagaaaggacgaataagtgccactcttaataccaaggagggttacagctatttgtacatcaaaggatcccagcctgaagactcagccacatacctctgtgcctttttgcaaagttatggaggaagccaaggaaatctcatctttggaaaaggcactaaactctctgttaaaccaaatatccagaaccctgaccctgccgt

SEQ ID NO: 10 - DNA, 639 bp, synthetic construct
  source 1..639: mol_type = other DNA
tacacgacgctcttccgatctggggtccggtgtcgggaattacacgacgctcttccgatctgggagtcttgctcctcacagagctttgggtgtcgggaagcaccagtgccctgaggaagggccatttccaaaagccctgtgctgacacagggttgctggttcctcttcaagagcccactctctggggtggggccatatctccagcagaggtgggctggaaaggacccccccaatcccgcccgccgtgagcttagctggagccatggcctctgcacccatctcgatgcttgcgatgctcttcacattgagtgggctgagagctcagtcagtggctcagccggaagatnnngacctattcagtctctggaaacccttatcttttttggtatgttcaataccccaaccgaggcctccagttccttctgaaatacatcacaggggataacctggttaaaggcagctatggctttgaagctgaatttaacaagagccaaacctccttccacctgaagaaaccatctgcccttgtgagcgactccgctttgtacttctgtgctgtgagagcccgggagctgctctttgcaagggggaccatgttaaaggtggatcttaatatccagaaccctgaccctgccgttt

SEQ ID NO: 11 - DNA, 622 bp, synthetic construct
  source 1..622: mol_type = other DNA
tacacgacgctcttccgatctgggggtttcctgttctagggcagcagtagcagcagcacatggcccagtaattcttctctcaccatgccaggttcacttcacagtacagagtcctgaaaataaagaagaaaattttttttttatctagaaaaagaaccaaacattttttatctagaaaaagaaccaaacatgtcactttctagcctgctgaaggtggtcacagcttcactgtggctaggacctggcattgcccagaagataactcaaacccaaccaggaatgttcgtgcaggaaaaggaggctgtgactctggactgcacatatgaaccagtgatccaagttatggtctattctggtacaagcagcccagcagtggggaaatgatttttcttatttatcaggggtcttatgaccagcaaaatgcaacagaaggtcgctactcattgaatttccagaaggcaagaaaatccgccaaccttgtcatctccgcttcacaactgggggactcagcaatgtacttctgtgcaatgagttccgatactggagccaatagtaagctgacatttggaaaaggaataactctgagtgttagaccagatatccagaaccctgaccctgccgt

SEQ ID NO: 12 - DNA, 460 bp, synthetic construct
  source 1..460: mol_type = other DNA
ttacacgacgctcttccgatctggggaacagtgtcagtgtagtgactaaccctcctacttttggtgttgtgtttctgcctaggggtgaagagccaaaagatagaacagaattccgaggccctgaacattcaggagggtaaaacggccaccctgacctgcaactatacaaactattctccagcatacttacagtggtaccgacaagatccaggaagaggccctgttttcttgctactcatacgtgaaaatgagaaagaaaaaaggaaagaaagactgaaggtcacctttgataccacccttaaacagagtttgtttcatatcacagcctcccagcctgcagactcagctacctacctctgtgcttccctcctgttttctggtggctacaataagctgatttttggagcagggaccaggctggctgtacacccatatatccagaaccctgaccctgccgttt

SEQ ID NO: 13 - DNA, 662 bp, synthetic construct
  source 1..662: mol_type = other DNA
tacacgacgctcttccgatctggggcttgtaccaggcaacccatttaggagaagttggatgaagagggagagggagatgctactcatcacatcaatgttggtcttatggatgcaaattgtcactacacgacgctcttccgatctggggtggtatcaacgcagnttacacgacgctcttccgatctggggcttgtaccaggcaacccatttaggagaagttggatgaagagggagagggagatgctactcatcacatcaatgttggtcttatggatgcaaattgtcacaggtgaatggacaacaggtaatgcaaattcctcagtaccagcatgtacaagaaggagaggacttcaccacgtactgcaattcctcaactactttaagcaatatacagtggtataagcaaaggcctggtggacatcccgttttttttgatacagttagtgaagagtggagaagtgaagaagcagaaaagactgacattttcagtttggagaagcaaaaaagaacagctccctgcacatcacagccacccagactacagatgtaggaacctacttctgtgcagggatgaattatggaggaagccaaggaaatctcatctttggaaaaggcactaaactctctgttaaaccaaatatccagaaccctgaccctgccgt

SEQ ID NO: 14 - DNA, 727 bp, synthetic construct
  source 1..727: mol_type = other DNA
tacacgacgctcttctacacgacgctcttccgatctggggcattgcagctcagacacagcaaaagagcctagaacctgggtcctagtttgcacctagaatatgaggcaagtggcgagagtgatcgtgttcctgaccctgagttacacgacgctcttctacacgacgctcttccgatctggggcattgcagctcagacacagcaaaagagcctagaacctgggtcctagtttgcacctagaatatgaggcaagtggcgagagtgatcgtgttcctgaccctgagtactttgagccttgctaagaccacccagcccatctccatggactcatatgaaggacaagaagtgaacataacctgtagccacaacaacattgctacaaatgattatatcacgtggtaccaacagtttcccagccaaggaccacgatttattattcaaggatacaagacaaaagttacaaacgaagtggcctccctgtttatccctgccgacagaaagtccagcactctgagcctgccccgggtttccctgagcgacactgctgtgtactactgcccccgaaaggacagagatgacaagatcatctttggaaaagggacacgacttcatattctccccaatatccagaaccctgaccctgccgttacaaaagggagtttattgtgaggcatcaaacactgtganactcacgggaggagnaggaactcaananccaganccctgac

SEQ ID NO: 15 - DNA, 338 bp, synthetic construct
  source 1..338: mol_type = other DNA
gccttcgtcggcagcgtcagatgtgtataagagacagtacacgacgctcttccgatctgggagagtacgtgattcatggtcttacaagcaatgtgaacaacagaatggcctctctggcaatcgctgaagacagaaagtccagtaccttgatcctgcaccgtgctaccttgagagatgctgctgtgtactactgcatcctgagagacagggattctatggtcagaattttgtctttggtcccggaaccagattgtccgtgctgccctatatccagaaccctgaccctgccgtctgtctcttatacacatctccgagcccacgagacgtagaggaatctc

SEQ ID NO: 16 - DNA, 506 bp, synthetic construct
  source 1..506: mol_type = other DNA
tacacgacgctcttccgatctgggnactgtgatttcttcatgttaagnnncactaaagatgaactattctccaggcttagtatctctgatactcttactgcttggaaagatgaactattctccaggcttagtatctctgatactcttactgcttggaagaacccgtggaaattcagtgacccagatggaagggccagtgactctctcagaagaggccttcctgactataaactgcacgtacacagccacaggatacccttcccttttctggtatgtccaatatcctggagaaggtctacagctcctcctgaaagccacgaaggctgatgacaagggaagcaacaaaggttttgaagccacataccgtaaagaaaccacttctttccacttggagaaaggctcagttcaagtgtcagactcagcggtgtacttctgtgctcttgcggggagcgatgacaagatcatctttggaaaagggacacgacttcatattctccccaatatcc

SEQ ID NO: 17 - DNA, 662 bp, synthetic construct
  source 1..662: mol_type = other DNA
ggnaggacagatttcttttatgattcctacagcagaaaaatgagaaacgtttgttattatttttttttcgtgtttaaggtttgaatcctcagtgaaccagggcagaaaagaatgatgaaatccttgagagttttactggtgatcctgtggcttcagttaagctgggtttggagccaacagaatttttttcgtgtttaaggtttgaatcctcagtgaaccagggcagaaaagaatgatgaaatccttgagagttttactggtgatcctgtggcttcagttaagctgggtttggagccaacagaaggaggtggagcaggatcctggaccactcagtgttccagagggagccattgtttctctcaactgcacttacagcaacagtgcttttcaatacttcatgtggtacagacagtattccagaaaaggccctgagttgctgatgtacacatactccagtggtaacaaagaagatggaaggtttacagcacaggtcgataaatccagcaagtatatctccttgttcatcagagactcacagcccagtgattcagccacctacctctgtgcaatgagcggggccggcaacacaggcaaactaatctttgggcaagggacaactttacaagtaaaaccagatatccagaaccctgaccctgccgttt

SEQ ID NO: 18 - DNA, 614 bp, synthetic construct
  source 1..614: mol_type = other DNA
ttacacgacgctcttccgatctgggagtcttgctcctcacagagctttgaggtgtcgggaagcaccagtgccctgaggaagggccatttccaaaagccctgtgctgacacagggttgctggttcctcttcaagagcccactctctggggtggggccatatctccagcagaggtgggctggaaaggacccccccagtcccgcccgccgtgagcttagctggagccatggcctctgcacccatctcgatgcttgcgatgctcttcacattgagtgggctgagagctcagtcagtggctcagccggaagatnnnggtcaacgttgctgaaggtggaaacccttatcttttttggtatgttcaanaccccaaccgaggcctccagttccttctgaaatacatcacaggggataacctggttaaaggcagctatggctttgaagctgaatttaacaagagccaaacctccttccacctgaagaaaccatctgcccttgtgagcgactccgctttgtacttctgtgctgtgagaccattaactggggcaaacaacctcttctttgggactggaacgagactcaccgttattccctatatccagaaccctgaccctgccgt

SEQ ID NO: 19 - DNA, 698 bp, synthetic construct
  source 1..698: mol_type = other DNA
ttacacgacgctcttccgatctgggactcttctagcccagagaagtctgttccaggacgggctctttcaggagcagctaaagtcaggggccatgtccaccatgtgatagaaagacaagatggtcctgaaattctccgtgtccattctttggattcagttggcatgtgagtacacgacgctcttccgatctgggactcttctagcccagagaagtctgttccaggacgggctctttcaggagcagctaaagtcaggggccatgtccaccatgtgatagaaagacaagatggtcctgaaattctccgtgtccattctttggattcagttggcatgggtgagcacccagctgctggagcagagccctcagtttctaagcatccaagagggagaaaatctcactgtgtactgcaactcctcaagtgttttttccagcttacaatggtacagacaggagcctggggaaggtcctgtcctcctggtgacagtagttacgggtggagaagtgaagaagctgaagagactaacctttcagtttggtgatgcaagaaaggacagttctctccacatcactgcagcccagcctggtgatacaggcctctacctctgtgcaggagaggaggcaggaactgctctgatctttgggaagggaaccaccttatcagtgagttccaatatccagaaccctgaccctgccgtnt

SEQ ID NO: 20 - DNA, 825 bp, synthetic construct
  source 1..825: mol_type = other DNA
ttacacgacgctcttccgatctggggtcaattctcgttgtgttccacactcatgggggatttcctcaaagtttatgaagttggcctgaagaaagcagttacttcgactcctctttgtgaaccacaggaaactgaacatagggcagagcgtttctaggacatttatgggagctggtctctgattggctaggcaaccagatgcagaatcctgttttctgaagcagaatatttccacagattttggctgcaaaacgtttttctgctgtgggtacgtgagcaggaaacatggagaagaatcctttggcagccccattactaatcctctggtttcatcttgactgcgtgagcagcatactgaacgtggaacaaagtctnnnnntttttctgctgtgggtacgtgagcaggaaacatggagaagaatcctttggcagccccattactaatcctctggtttcatcttgactgcgtgagcagcatactgaacgtggaacaaagtcctcagtcactgcatgttcaggagggagacagcaccaatttcacctgcagcttcccttccagcaatttttatgccttacactggtacagatgggaaactgcaaaaagccccgaggccttgtttgtaatgactttaaatggggatgaaaagaagaaaggacgaataagtgccactcttaataccaaggagggttacagctatttgtacatcaaaggatcccagcctgaagactcagccacatacctctgtgcctacggtaaccagttctattttgggacagggacaagtttgacggtcattccaaatatccagaaccctgaccctgccgt

SEQ ID NO: 21 - DNA, 581 bp, synthetic construct
  source 1..581: mol_type = other DNA
gtaattcttctctcaccatgccaggttcacttcacagtacagagtcctgaaaataaagaagaaaatttttttttatctagaaaaagaaccaaacatgtcactttctagcctgctggtcctgaaaataaagaagaaaatttttttttatctagaaaaagaaccaaacatgtcactttctagcctgctgaaggtggtcacagcttcactgtggctaggacctggcattgcccagaagataactcaaacccaactgcaggaaaaggaggctgtgactctggactcacatatgacaccagtgatccaagttatggtctattctggtacaagcagcccagcagtggggaaatgatttttcttatttatcaggggtcttatgaccagcaaaatgcaacagaaggtcgctactcattgaatttccagaaggcaagaaaatccgccaaccttgtcatctccgcttcacaactgggggactcagcaatgtacttctgtgcaatgagagagggcccccttgacgacatgcgctttggagcagggaccagactgacagtaaaaccaaatatccagaaccctgaccctgccgt

SEQ ID NO: 22 - DNA, 918 bp, synthetic construct
  source 1..918: mol_type = other DNA
antttgtcttatgttattcccatttgccgtctctgttccttatacattatgctttttcaactttaccagaatcacttggattaggnnatgttcatgtgaagacacttctgtagtaacagaacctacagctgctcctgtagaaggaagttgaaagtcatcccttcaagaaaggggctcgactgagtttccttccctcacccacatgaagtgtctaccttctgcagactccaatggctcaggaactgggaatgcagtgccaggctcgtggtatcctgcagcagatgtggggagttttccttctttatgtttccatgaagatgggaggcactacaggacaaaacattgaccagcccactgagatgacagctacggaaggtgccattgtccagatcaactgcacgtaccagaaatctgggttcatacacgacgctcnnnnacatgaagtgtctaccttctgcagactccaatggctcaggaactgggaatgcagtgccaggctcgtggtatcctgcagcagatgtggggagttttccttctttatgtttccatgaagatgggaggcactacaggacaaaacattgaccagcccactgagatgacagctacggaaggtgccattgtccagatcaactgcacgtaccagacatctgggttcaacgggctgttctggtaccagcaacatgctggcgaagcacctacatttctgtcttacaatgttctggatggtttggaggagaaaggtcgtttttcttcattccttagtcggtctaaagggtacagttacctccttttgaaggagctccagatgaaagactctgcctcttacctctgtgctgtgagaggcgactacaagctcagctttggagccggaaccacagtaactgtaagagcaaatatccagaaccctgaccctgccgt

SEQ ID NO: 23 - DNA, 801 bp, synthetic construct
  source 1..801: mol_type = other DNA
tacacgacgctcttccgatctgggggactaaacctggggaggaagacatagnanaactagtagctgttgcttctgttctctggaaattctttaaacctagaatcagacacaaaaactgaactctgggtccacaatcctcatttgtccttgaagtatgaggctggtggcaagagtaactgtgtttctgacctttggaactataattgatgctaagaccacccagcccccctccatggattgcgctgaaggaagagctgcaaacctgctctaccatcagtggaaatgnatgtgtattggtatcgacnnnttacacgacgctcttccgatcttgttgcttctgttctctggaaattctttagggtccacaatcctcatttgtccttgaagtatgaggctggtggcaagagtaactgtgtttctgacctttggaactataattgatgctaagaccacccagcccccctccatggattgcgctgaaggaagagctgcaaacctgccttgtaatcactctaccatcagtggaaatgagtatgtgtattggtatcgacagattcactcccaggggccacagtatatcattcatggtctaaaaaacaatgaaaccaatgaaatggcctctctgatcatcacagaagacagaaagtccagcaccttgatcctgccccacgctacgctgagagacactgctgtgtactattgcatcgtcagacgttatggaggaagccaaggaaatctcatctttggaaaaggcactaaactctctgttaaaccaaatatccagaaccctgaccctgccgt

SEQ ID NO: 24 - DNA, 559 bp, synthetic construct
  source 1..559: mol_type = other DNA
actttgagcttcaggcagcacaactcacatttgtgcaaagagctacatgccacatgctgttctccagcctgctgtgtgtatttgtggccttcagctactctggacatttgtgcaaagagctacatgccacatgctgttctccagcctgctgtgtgtatttgtggccttcagctactctggatcaagtgtggcccagaaggttactcaagcccagtcatcagtatccatgccagtgaggaaagcagtcaccctgaactgcctgtatgaaacaagttggtggtcatattatattttttggtacaagcaacttcccagcaaagagatgattttccttattcgccagggttctgatgaacagaatgcaaaaagtggtcgctattctgtcaacttcaagaaagcagcgaaatccgtcgccttaaccatttcagccttacagctagaagattcagcaaagtacttttgtgctcttggcaggagcaacacaggcaaactaatctttgggcaagggacaactttacaagtaaaaccagatatccagaaccctgaccctgccgttcgt

SEQ ID NO: 25 - DNA, 471 bp, synthetic construct
  source 1..471: mol_type = other DNA
tacacgacgctcttccgatctgggaaagagagctcatctgtaggagccttgctccatttcaggtctcctgtgatttcaataaggaagaagaatggaaannctnnnnagggtgaacagtcaacagggagaagaggatcctcaggccttgagcatccaggagggtgaaaatgccaccatgaactgcagttacaaaactagtataaacaatttacagtggtatagacaaaattcaggtagaggccttgtccacctaattttaatacgttcaaatgaaagagagaaacacagtggaagattaagagtcacgcttgacacttccaagaaaagcagttccttgttgatcacggcttcccgggcagcagacactgcttcttacttctgtgctacggccgccggagggggtgacatgcgctttggagcagggaccagactgacagtaaaaccaaatatccagaaccctgaccctgccgt

SEQ ID NO: 26 - DNA, 607 bp, synthetic construct
  source 1..607: mol_type = other DNA
tacacgacgctcttccgatctggggtacacagtgtgagaaggagagaagagacaacctgatgatagaagtaactcttataactggaggttgcaggtcaatgactgatcttaattgggaagaacaaggatgacatccattcgagctgtattaattgggaagaacaaggatgacatccattcgagctgtatttatattcctgtggctgcagctggacttggtgaatggagagaatgtggagcagcatccttcaaccctgagtgtccaggagggagacagcgctgttatcaagtgtacttattcagacagtgcctcaaactacttcccttggtataagcaagaacttggaaaaagacctcagcttattatagacattcgttcaaatgtgggcgaaaagaaagaccaacgaattgctgttacattgaacaagacagccaaacatttctccctgcacatcacagagacccaacctgaagactcggctgtctacttctgtgcagcaagtagaacgggaagcagtgcttccaagataatctttggatcagggaccagactcagcatccggccaaatatccagaaccctgaccctgccgtnnntctcttatacac

SEQ ID NO: 27 - DNA, 590 bp, synthetic construct
  source 1..590: mol_type = other DNA
ttacacgacgctcttccgatctggggtacacagtgtgggagagaagagacaacctgatgatagaagtaactcttataactggaggttgcaggtcaatgactgatcttaattgggaagaacaaggatgacatccattcgagctgtattaattgggaagaacaaggatgacatccattcgagctgtatttatattcctgtggctgcagctggacttggtgaatggagagaatgtggagcagcatccttcaaccctgagtgtccaggagggagacagcgctgttatcaagtgtacttattcagacagtgcctcaaactacttcccttggtataagcaagaacttggaaaaagacctcagcttattatagacattcgttcaaatgtgggcgaaaagaaagaccaacgaattgctgttacattgaacaagacagccaaacatttctccctgcacatcacagagacccaacctgaagactcggctgtctacttctgtgcagcaagtagaacgggaagcagtgcttccaagataatctttggatcagggaccagactcagcatccggccaaatatccagaaccctgaccctgccgtt

SEQ ID NO: 28 - DNA, 635 bp, synthetic construct
  source 1..635: mol_type = other DNA
gtacacgacgctcttccgatcagaaaggaatacccgatgatggaagtagctcttatggctggagattgcaggtttatgactgatcctatttgggaagaacaatgatggcaggcattcgagctttatttatgtacttgtggctgcagcttacacgacgctcttcgctggagattgcaggtttatgactgatcctatttgggaagaacaatgatggcaggcattcgagctttatttatgtacttgtggctgcagctggactgggtgagcagaggagagagtgtggggctgcatcttcctaccctgagtgtccaggagggtgacaactctattatcaactgtgcttattcaaacagcgcctcagactacttcatttggtacaagcaagaatctggaaaaggtcctcaattcattatagacattcgttcaaatatggacaaaaggcaaggccaaagagtcaccgttttattgaataagacagtgaaacatctctctctgcaaattgcagctactcaacctggagactcagctgtctacttttgtgcagagcctttgggggctgggagttaccaactcactttcgggaaggggaccaaactctcggtcataccaaatatccagaaccctgaccctgccgt

SEQ ID NO: 29 - DNA, 581 bp, synthetic construct
  source 1..581: mol_type = other DNA
gngaagagacaacctgatgatagaagtaactcttataactggaggttgcaggtcaatgactgatcttaattgggaagaacaaggatgacatccattcgagctgtatttatattcctgtggctgcagctggactgtgtacactcttaattgggaagaacaaggatgacatccattcgagctgtatttatattcctgtggctgcagctggacttggtgaatggagagaatgtggagcagcatccttcaaccctgagtgtccaggagggagacagcgctgttatcaagtgtacttattcagacagtgcctcaaactacttcccttggtataagcaagaacttggaaaaagacctcagcttattatagacattcgttcaaatgtgggcgaaaagaaagaccaacgaattgctgttacattgaacaagacagccaaacatttctccctgcacatcacagagacccaacctgaagactcggctgtctacttctgtgcagcaagcccttacaacttcaacaaattttactttggatctgggaccaaactcaatgtaaaaccaaatatccagaaccctgaccctgccgt

SEQ ID NO: 30 - DNA, 682 bp, synthetic construct
  source 1..682: mol_type = other DNA
gcccagtaattcttctctcaccatgccaggttcacttcacagtacagagtcctgaaaataaagaagaaaatttttttttatctagaaaaagaaccaaacatgtcactttctagcctgctgaaggtatctagaaaaagaaccaaacatgtcactttctagcctgctgaaggtggtcacagcttcactgtggctaggacctggcattgcccagaagataactcaaacccaaccaggaatgttcgtgcaggaaaaggaggctgtgactctggactgcacatatgacaccagtgatccaagttatggtctattctggtacaagcagcccagcagtggggaaatgatttttcttatttatcaggggtcttatgaccagcaaaatgcaacagaaggtcgctactcattgaatttccagaaggcaagaaaatccgccaaccttgtcatctccgcttcacaactgggggactcagcaatgtacttctgtgcaatgagagagtcgtcaggaggaagctacatacctacatttggaagaggaaccagccttattgttcatccgtatatccagaaccctgaccctgccgtttgtctcttatacacatctccgagcccacgagacgtagaggaatctcgtatgccgtcttctgcttgaaaaaaaaaaaaaaaaaaaaaaaagtatatacaaaca

SEQ ID NO: 31 - DNA, 580 bp, synthetic construct
  source 1..580: mol_type = other DNA
gagccattctccatatttcagatataagatttcagttctcagtgagtctaagtgacagaaggaatggagaccctcttgggcctgcttatcctttggctgcagctgcaatgtggatataagatttcagttctcagtgagtctaagtgacagaaggaatggagaccctcttgggcctgcttatcctttggctgcagctgcaatgggtgagcagcaaacaggaggtgacacagattcctgcagctctgagtgtcccagaaggagaaaacttggttctcaactgcagtttcactgatagcgctatttacaacctccagtggtttaggcaggaccctgggaaaggtctcacatctctgttgcttattcagtcaagtcagagagagcaaacaagtggaagacttaatgcctcgctggataaatcatcaggacgtagtactttatacattgcagcttctcagcctggtgactcagccacctacctctgtccccccgcggccttcacgggaggaggaaacaaactcacctttgggacaggcactcagctaaaagtggaactcaatatccagaaccctgaccctgccgt

SEQ ID NO: 32 - DNA, 464 bp, synthetic construct
  source 1..464: mol_type = other DNA
cagaatatgaactaagatacagaagtggcgcctctgagaaaagaaggttggaattatcgtaatttgtttctaggctgagatattcagcttggctggttgagtggagaagaccaggtgacgcagagtcccgaggccctgagactccaggagggagagagtagcagtctcaactgcagttacacagtcagcggtttaagagggctgttctggtataggcaagatcctgggaaaggccctgaattcctcttcaccctgtattcagctggggaagaaaaggagaaagaaaggctaaaagccacattaacaaagaaggaaagctttctgcacatcacagcccctaaacctgaagactcagccacttatctctgtgctgtgcccgaaagcaggaatggccagaagctgctctttgcaagggggaccatgttaaaggtggatcttaatatccagaaccctgaccctgccgt

SEQ ID NO: 33 - DNA, 603 bp, synthetic construct
  source 1..603: mol_type = other DNA
gcctcacacagcccagtaactttgctagtacctcttgagtgcaaggtggagaattaagatctggatttgagacggagcacggaacatttcactcaggggaagagctatgaacatgctgactgccagcctgttgagggcagtcatagcctccatctgtgttnatccagcatggctggatttgagacggagcacggaacatttcactcaggggaagagctatgaacatgctgactgccagcctgttgagggcagtcatagcctccatctgtgttgtatccagcatggctcagaaggtaactcaagcgcagactgaaatttctgtggtggagaaggaggatgtgaccttggactgtgtgtcagaaatccancagttccttcaacttcaccatcacagcctcacaagtcgtggactcagcagtatacttctgtgctctgagtgagcacaaagctgcaggcaacaagctaacttttggaggaggaaccagggtgctagttaaaccaaatatccagaaccctgaccctgccgtctgtctcttatacacatctccgagcccacgagactaaggcgaatctcgtatgccgtcttctgcttgaaaaaaaaaa

SEQ ID NO: 34 - DNA, 623 bp, synthetic construct
  source 1..623: mol_type = other DNA
tnngnggttcatatgtaaaatgaagggtctgtggaaggacatgaataaagcacaggaggttgaagtcagatttgcagctttctaggcaggagataagacaatctgcatcttcacaggagggatggccatgctcctgggggcatcagtataagacaatctgcatcttcacaggagggatggccatgctcctgggggcatcagtgctgattctgtggcttcagccagactgggtaaacagtcaacagaagaatgatgaccagcaagttaagcaaaattcaccatccctgagcgtccaggaaggaagaatttctattctgaactgtgactatactaacagcatgtttgattatttcctatggtacaaaaaataccctgctgaaggtcctacattcctgatatctataagttccattaaggataaaaatgaagatggaagattcactgttttcttaaacaaaagtgccaagcacctctctctgcacattgtgccctcccagcctggagactctgcagtgtacttctgtgcagcaagcacaaataccggcactgccagtaaactcacctttgggactggaacaagacttcaggtcacgctcgatatccagaaccctgaccctgccgtt

SEQ ID NO: 35 - DNA, 608 bp, synthetic construct
  source 1..608: mol_type = other DNA
ttacacgacgctcttccgatctgggggacttctgtgagtaggctgacggcagaagcagacagtgctttggaggaaaggaagagatacttgataatatagctctcttggctggagattgcaggtcccagtggggagaacaatgaagacatttgnnctcttggctggagattgcaggtcccagtggggagaacaatgaagacatttgctggattttcgttcctgtttttgtggctgcagctggactgtatgagtagaggagaggatgtggagcagagtcttttcctgagtgtccgagagggagacagctccgttataaactgcacttacacagacagctcctccacctacttatactggtataagcaagaacctggagcaggtctccagttgctgacgtatattttttcaaatatggacatgaaacaagaccaaagactcactgttctattgaataaaaaggataaacatctgtctctgcgcattgcagacacccagactggggactcagctatctacttctgtgcagagaacggggcaaacaacctcttctttgggactggaacgagactcaccgttattccctatatccagaaccctgaccctgccgt

SEQ ID NO: 36 - DNA, 731 bp, synthetic construct
  source 1..731: mol_type = other DNA
tacacgacgctcttccgatctgggggttctgaagcagctacgaaggttcagatcagaagaggaggcttctcaccctgcagcagggacctgtgagcatggcatgccctggcttcctgtgggcacttgtgatctccacctgtcttgtttagcatggctcagacagtcactcagtctcaaccagagatgtctgtgcaggaggcagagaccgtgaccctgagctgcacntacacgacgctcttccgatctggggagatcagaagaggaggcttctcaccctgcagcagggacctgtgagcatggcatgccctggcttcctgtgggcacttgtgatctccacctgtcttgaatttagcatggctcagacagtcactcagtctcaaccagagatgtctgtgcaggaggcagagaccgtgaccctgagctgcacatatgacaccagtgagagtgattattatttattctggtacaagcagcctcccagcaggcagatgattctcgttattcgccaagaagcttataagcaacagaatgcaacagagaatcgtttctctgtgaacttccagaaagcagccaaatccttcagtctcaagatctcagactcacagctgggggatgccgcgatgtatttctgtgcttatagtgctagtggaggtagcaactataaactgacatttggaaaaggaactctcttaaccgtgaatccaaatatccagaaccctgaccctgccgtt

SEQ ID NO: 37 - DNA, 602 bp, synthetic construct
  source 1..602: mol_type = other DNA
gagatagcaaagcagagtgtttatcttgtgagccattctccatatttcagatataagntttcagttctcagtgagtctaagtgacagaaggaatggagaccctcttgggcctgcttatcctttggctgcagctgcaatgggtgagcagcaaacaggaggtgacacatacacgactctaagtgacagaaggaatggagaccctcttgggcctgcttatcctttggctgcagctgcaatgggtgagcagcaaacaggaggtgacacagattcctgcagctctgagtgtcccagaaggagaaaacttggttctcaactgcagtttcactgatagcgctatttacaacctccagtggtttaggcaggaccctgggaaaggtctcacatctctgttgcttattcagtcaagtcagagagagcaaacaagtggaagacttaatgcctcgctggataaatcatcaggacgtagtactttatacattgcagcttctcagcctggtgactcagccacctacctctgtgctgtgaataacaatgacatgcgctttggagcagggaccagactgacagtaaaaccaaatatccagaaccctgaccctgccgtt

SEQ ID NO: 38 - DNA, 677 bp, synthetic construct
  source 1..677: mol_type = other DNA
gggactgaactttgagcttcaggcagcacaactcacatttgtgcaaagagctacatgccacatgctgttctccagcctgctgtgtgtatttgtggccttcagctactctggtatggatggttccaagtggctactctggatcaagtgtggcccagaaggttactcaagcccagtcatcagtatccatgccagtgaggaaagcagtcaagttggtggtcatattatattttttggtacaagcaacttcccagcaaagagatgattttccttattcgccagggttctgatgaacagaatgcaaaaagtggtcgctattctgtcaacttcaagaaagcagcgaaatccgtcgccttaaccatttcagccttacagctagaagattcagcaaagtacttttgtgctcttggggaactagaaggcttcaaaactatctttggagcaggaacaagactatttgttaaagcaaatatccagaaccctgaccctgccgttgnnnntcgcattaaaaacacaaaatcctacggaaatactgaagaatgagtctcagcactaaggaaaagcctccagcagctcctgctttctgagggtgaaggatagacgctgtggctctgcatgactcactagcactctatcacggccatattctggcaggatatccagaaccctgaccctgccgt

SEQ ID NO: 39 - DNA, 593 bp, synthetic construct
  source 1..593: mol_type = other DNA
cgatctgggagaggagagaagagacaacctgatgatagaagtaactcttataactggaggttgcaggtcaatgactgatcttaattgggaagaacaaggatgacatccattcgagctgtatttatattcctgtggctgcagctggactntgntacacggatcttaattgggaagaacaaggatgacatccattcgagctgtatttatattcctgtggctgcagctggacttggtgaatggagagaatgtggagcagcatccttcaaccctgagtgtccaggagggagacagcgctgttatcaagtgtacttattcagacagtgcctcaaactacttcccttggtataagcaagaacttggaaaaagacctcagcttattatagacattcgttcaaatgtgggcgaaaagaaagaccaacgaattgctgttacattgaacaagacagccaaacatttctccctgcacatcacagagacccaacctgaagactcggctgtctacttctgtgcagcaagccccaacatgctcacctttggagggggaacaaggttaatggtcaaaccccatatccagaaccctgaccctgccgttt

SEQ ID NO: 40 - DNA, 643 bp, synthetic construct
  source 1..643: mol_type = other DNA
tacacgacgctcttccgatctggggagagtgtttatcttgtgagccattctccatatttcagatataagatttcagttctcagtgagtctaagtgacagaaggaatggagaccctcttgggcctgcttatcctttggctgcagctgcaatgtgtacacgacgctcttccgatctggggagagtgtttatagatataagatttcagttctcagtgagtctaagtgacagaaggaatggagaccctcttgggcctgcttatcctttggctgcagctgcaatgggtgagcagcaaacaggaggtgacacagattcctgcagctctgagtgtcccagaaggagaaaacttggttctcaactgcagtttcactgatagcgctatttacaacctccagtggtttaggcaggaccctgggaaaggtctcacatctctgttgcttattcagtcaagtcagagagagcaaacaagtggaagacttaatgcctcgctggataaatcatcaggacgtagtactttatacattgcagcttctcagcctggtgactcagccacctacctctgtgctgtggacaccgacaagctcatctttgggactgggaccagattacaagtctttccaaatatccagaaccctgaccctgccgt

SEQ ID NO: 41 - DNA, 661 bp, synthetic construct
  source 1..661: mol_type = other DNA
tacacgacgctcttccgatctgggggcagttgctgctgggctcattgcagctcagacacagcaaaagagcctagaacctgggtcctagtttgcacctagaatatgaggcaagtggcgagagtgatcgtgttcctgaccctgagtgtacacgacgctcttccgatctgggggcagttgctgctgggctcattgcagctcagacacagcaaaagagcctagaacctgggtcctagtttgcacctagaatatgaggcaagtggcgagagtgatcgtgttcctgaccctgagtactttgagccttgctaagaccacccagcccatctccatggactcatatgaaggacaagaagtgaacataacctgtagccacaacaacattgctacaaatgattatatcacgtggtaccaacagtttcccagccaaggaccacgatttattattcaaggatacaagacaaaagttacaaacgaagtggcctccctgtttatccctgccgacagaaagtccagcactctgagcctgccccgggtttccctgagcgacactgctgtgtactactgcctcgtgggtgaccccaaagctgcaggcaacaagctaacttttggaggaggaaccagggtgctagttaaaccaaatatccagaaccctgaccctgccgtt

SEQ ID NO: 42 - DNA, 595 bp, synthetic construct
  source 1..595: mol_type = other DNA
tttacacgacgctcttccgatctgggggggcagaagcctcacacagcccagtaactttgctagtacctcttgagtgcaaggtggagaattaagatctggatttgagacggagcacggaacatttcactcaggggaagagctatgaacatgctgactgccagcctgttgagggcagtcatagcctccatctgtgttgatccagcatgtacctggatttgagacggagcacggaacatttcactcaggggaagagctatgaacatgctgactgccagcctgttgagggcagtcatagcctccatctgtgttgtatccagcatggctcagaaggtaactcaagcgcagactgaaatttctgtggtggagaaggaggatgtgaccttggactgtgcnngnngtggactcagcagtatacttctgtgctctgagtgaggccggttctgcaaggcaactgacctttggatctgggacacaattgactgttttacctgatatccagaaccctgaccctgccgtctgtctcttatacacatctccgagcccacgagacaggcagaaatctcgtatgccgtcttctgcttgaaaaaaaaaaaaa

SEQ ID NO: 43 - DNA, 975 bp, synthetic construct
  source 1..975: mol_type = other DNA
gtcttatgttattcccatttgccgtctctgttccttatacattacttggattaaaacccgtggatttctcagtaggaaatgttcatgtgaagacacttctgtagtaacagaacctacagctgctcctgtagaaggaagttgaaagtcatcccttcaagaaaggggctcctccccttgtaatncagactgagtttccttccctcacccacatgaagtgtctaccttctgcagactccaatggctcaggaactgggaatgcagtgccaggctcgtggtatcctgcagcagatgtggggagttttccttctttatgtttccatgaagatgggaggtatacacgacgctcttccgatctggggggaatgcagtgccaggctcgtggtatcctgcagcagatgtggggagttttccttctttatgtttccatgaagatgggaggcactacaggacaaaacattgaccagcccactgagatgacagctacggaaggtgccattgtccagatcaactgcacgtaccagacatctgggttcaacgggctgttctggtaccagcaacatgctggcgaagcacccacatttctgtcttacaatgttctggatggtttggaggagaaaggtcgtttttcttcattccttagtcggtctaaagggtacagttacctccttttgaaggagctccagatgaaagactctgcctcttacctctgtgctgtgagagaaactgacagctgggggaaattccagtttggagcagggacccaggttgtggtcaccccagntnncnacactaaggaaaagcctccagcagctcctgctttctgagggtgaaggatagacgctgtggctctgcatgactcactagcactctatcacggccatattctggcaggatatccagaaccctgaccctgccgttgaagattntcnagatnnactgcacgtacnanacatcnnggttcaangggnnnttntg

SEQ ID NO: 44 - DNA, 606 bp, synthetic construct
  source 1..606: mol_type = other DNA
tacacgacgctcttccgatctgggttttttttcgtgtttaaggtttgaatcctcagtgaaccagggcagaaaagaatgatgaaatccttgagagttttactggtgattacacgacgctcttccgatctgggttttttttcgtgtttaaggtttgaatcctcagtgaaccagggcagaaaagaatgatgaaatccttgagagttttactggtgatcctgtggcttcagttaagctgggtttggagccaacagaaggaggtggagcaggatcctggaccacnnnngtttctctcaactgcacttacagcaacagtgcttttcaatacttcatgtggtacagacagtattccagaaaaggccctgagttgctgatgtacacatactccagtggtaacaaagaagatggaaggtttacagcacaggtcgataaatccagcaagtatatctccttgttcatcagagactcacagcccagtgattcagccacctacctctgtgcaatgagcgggaccatggacacgggcaggagagcacttacttttgggagtggaacaagactccaagtgcaaccaaatatccagaaccctgaccctgccgtnnntgncgt

SEQ ID NO: 45 - DNA, 493 bp, synthetic construct
  source 1..493: mol_type = other DNA
gggactgaactttgagcttcaggcagcacaactcacatttgtgcaaagagctacatgccacatgctgttctccagcctgctgtgtgtatttgtggccttcagctactctggtatggatggttccaagtgacatttgtgcaaagagctacatgccaccagtgaggaaagcagtcaccctgaactgcctgtatgaaacaagcaagcaacttcccagcaaagagatgattttccttattcgccagggttctgatgaacagaatgcaaaaagtggtcgctattctgtcaacttcaagaaagcagcgaaatccgtcgccttaaccatttcagccttacagctagaagattcagcaaagtacttttgtgctcttggggaacctacctcaggaacctacaaatacatctttggaacaggcaccaggctgaaggttttagcaaatatccagaaccctgaccctgccgtntgtctctcnncntnaaaaaaaaaaannannna

SEQ ID NO: 46 - DNA, 747 bp, synthetic construct
  source 1..747: mol_type = other DNA
ttacacgacgctcttccgatctgggagattctttttatgattcctaaagtggaagaaataaagtatctctgctatgttcatttctttttggattgaaaattttaatcctcagtgaaccagggcagaaaagaatgatgatatccttgagagttttactggtgatcctgtggcttcagttaagctgggtttggagtacacgacgctcttccgatctgggagattctttttatgattcctaaagtggaagaaataaagtatctctgctatgttcatttctttttggattgaaaattttaatcctcagtgaaccagggcagaaaagaatgatgatatccttgagagttttactggtgatcctgtggcttcagttaagctgtacacgacgctcttccgatctgggggagcaggatcctggacccttcaatgttccagagggagccactgtcgctttcaactgtacttacagcaacagtgcttctcagtctttcttctggtacagacaggattgcaggaaagaacctaagttgctgatgtccgtatactccagtggtaatgaagatggaaggtttacagcacagctcaatagagccagccagtatatttccctgctcatcagagactccaagctcagtgattcagccacctacctctgtgtggtgaaggataatgcaggcaacatgctcacctttggagggggaacaaggttaatggtcaaaccccatatccagaaccctgaccctgccgttt

SEQ ID NO: 47 - DNA, 581 bp, synthetic construct
  source 1..581: mol_type = other DNA
cttctgggagcagatctctgcagaataaaaatgaaaaagcatctgacgaccttcttggtgattttgtggctttatttttatagtngnnnntttnnngnnttnnttttnnnngggggaatggcaaaaaccaagtggagcagagtcctcagtccctgatcatcctggagggaaagaactgcactcttcaatgcaattatacagtgagccccttcagcaacttaaggtggtataagcaagatacggggagaggtcctgtttccctgacaatcatgactttcagtgagaacacaaagtcgaacggaagatatacagcaactctggatgcagacacaaagcaaagctctctgcacatcacagcctcccagctcagcgattcagcctcctacatctgtgtggtccccggttcaggaggaagctacatacctacatttggaagaggaaccagccttattgttcatccgtatatccagaaccctgaccctgccgtttgtctcttatacacatctccgagcccacgagacgctcatgaatctcgtatgccgtcttctgcttgaaaaaaaaaaaaaaaaaaacacaacaac

SEQ ID NO: 48 - DNA, 632 bp, synthetic construct
  source 1..632: mol_type = other DNA
tacacgacgctcttccgatctggggagtcttgctcctcacagagttttccggtgtcgggaagcaccagtgccctgaggaagggccatttccaaaagccctgtgctgacacagggttgctggttcctcttcaagagcccactctctggggtggggccatatctccagcagaggtgggctggaaaggacccccccaatcccgcccgccgtgagcttagctggagccatggcctctgcacccatctcgatgcttgcgatgctcttcacattgagtgggctgagagctcagtcagtggctcagccggaagatctgagagctcagtcagtggctcagccggaagatcaggtcaacgttgctgaagggaatcctctgacttccgatctgggatttaacaagagccaaacctccttccacctgaagaaaccatctgcccttgtgagcgactccgctttgtacttctgtgctgtgagagccttcgggggaacctacaaatacatctttggaacaggcaccaggctgaaggttttagcaaatatccagaaccctgaccctgccgtctgtctcttatacacatctccgagcccacgagacatctcaggatctcgtatgccgtcttctgcttgaaaaaaaaaa

SEQ ID NO: 49 - DNA, 584 bp, synthetic construct
  source 1..584: mol_type = other DNA
ttacacgacgctcttccgatctggggattttctgctgcttctgatgggctgaaaatcccctttgatttctaaagtaaatgtagagacgttttaaaaataaaggactcctttgtccaagatatattccgaaatcctccaacagagacctgtgtgagcttctgctgcagtaataatggtgaagatccggcaatttttgttggctattttgtggcttcagctaagntgtaagtgccgccaaaaatgaagtggaaagatccggcaatttttgttggctattttgtggcttcagctaagctgtgtaagtgccgccaaaaatgaagtggagcagagtcctcagaacctgactgcccaggaaggagaatttatcacaagnctcccatcccagagactctgccgtctacatctgtgctgtccggggcgcctcgataaaggacaccgacaagctcatctttgggactgggaccagattacaagtctttccaaatatccagaaccctgaccctgccgtctgtctcttatacacatctccgagcccacgagactaaggcgaatctcgtatgccgtcttctgcttgaaaaaaaaaa

SEQ ID NO: 50 - DNA, 648 bp, synthetic construct
  source 1..648: mol_type = other DNA
ttacacgacgctcttccgatctgggggtttcctgttctagggcagcagtagcagcagcacatggcccagtaattcttctctcaccatgccaggttcacctcacagtacagagtcctgaaaataaagaagaagatttttttttatctagaaaaggaaccaaacatgtcactttctagcctgctgaaggtggtcacagcttcactgtggagatttttttttatctagaaaaggaaccaaacatgtcactttctagcctgctgaaggtggtcacagcttcactgtggctaggacctggcattgcccagaagataactcaaacccaaccaggaatgttcgtgcaggaaaaggaggctgtgactctggactgcacatatgacaccagtgatcaaagttatggtctattctggtacaagcagcccagcagtggggaaatgatttttcttatttatcaggggtcttatgacgagcaaaatgcaacagaaggtcgctactcattgaatttccagaaggcaagaaaatccgccaaccttgtcatctccgcttcacaactgggggactcagcaatgtatttctgtgcaatccctaaccaggcaggaactgctctgatctttgggaagggaaccaccttatcagtgagttccaannnnc

SEQ ID NO: 51 - DNA, 514 bp, synthetic construct
  source 1..514: mol_type = other DNA
gggggagagtaattctagccaccatatgaggcaagtggcgagagtgatcgtgttcctgaccctgagtactttgagccttgctaagaccacccagcccatctccatggactcatatgaaggacaagaagtgaacataacctgtagccacaacaacattgctacaaatgattatatcacgtggtaccaacagtttcccagccaaggaccacgatttattattcaaggatacaagacaaaagttacaaacgaagtggcctccctgtttatccctgccgacagaaagtccagcactctgagcctgccccgggtttccctgagcgacactgctgtgtactactgcctcgtgggtgaccccaaagctgcaggcaacaagctgacttttggaggaggaaccagggtgctggttaaaccaaatatccagaaccctgaccctgccgtctgtctcttatacacatctccgagcccacgagactcctgagcatctcgtatgccgtcttctgcttgaaaaaaaaaa

SEQ ID NO: 52 - DNA, 598 bp, synthetic construct
  source 1..598: mol_type = other DNA
ttacacgacgctcttccgatctgggttagttaaatatatcttatggtgaaaatgcccggagcaagaaggcaaagcatcatgaagaggatattgggagctctgctggggctcttgagtgcccaggtttgctgtgaggttaaatatatcttatggtgaaaatgcccggagcaagaaggcaaagcatcatgaagaggatattgggagctctgctggggctcttgagtgcccaggtttgctgtgtgagaggaatacaagtggagcagagtcctccagacctgattctccaggagggagccaattccacgctgcggtgcaatttttctgactctgtgaacaatttgcagtggtttcatcaaaacccttggggacagctcatcaacctgttttacattccctcagggacaaaacagaatggaagattaagcgccacgactgtcgctacggaacgctacagcttattgtacatttcctcttcccagaccacagactcaggcgtttattttctgtgctgtgggggaggcaggaactgctctgatctttgggaagggaaccaccttatcagtgagttccaatatccagaaccctgaccctgccgttt

SEQ ID NO: 53 - DNA, 512 bp, synthetic construct
  source 1..512: mol_type = other DNA
ttccgatctggggggagagtaattctagccaccatatgctcctggagcttatcccactgctggggatacattttgtcctgagaactgccagagcccagtcagtgacccagcctgacatccacatcactgtctctgaaggagcctcactggagttgagatgtaactattcctatggggcaacaccttatctcttctggtatgtccagtcccccggccaaggcctccagctgctcctgaagtacttttcaggagacactcaggctgaatttaagaggagtcatcttccttcaatctgaggaaaccctctgtgcattggagtgatgctgctgagtacttctgtgctgtgggtgccgggcaggcaggaactgctctgatctttgggaagggaaccaccctgtcagtgagttccaatatccagaaccctgaccctgccgtctgtctcttatacacatctccgagcccacgagacaggcagaaatctcgtatgccgtcttctgcttgaaaaaaaaaaa

SEQ ID NO: 54 - DNA, 685 bp, synthetic construct
  source 1..685: mol_type = other DNA
gggactctaagcccaagagagtttcttgaagaaaaaaaaaaaaaaaacccattcaggaaataattntttgcnganaannaaacatttattantaatnttntgganggacatgtgactnacacgacgctcttccgatctgggagcgaattctaaagggaaggaaattctgtgagggcaggagggannttacacgacgctcttccgatctgggagcgaattctaaagggaaggaaattctgtgagggcaggaggggtcagtggtcaacagctgaatcagagtcctcaatctatgtttatccaggaaggagaagntgtctccatgaactgcacttcttcaagcatatttaacacctggctatggtacaagcaggaccctggggaaggtcctgtcctcttgatagccttatataaggctggtgaattgacctcaaatggaagactgactgctcagtttggtataaccagaaaggacagcttcctgaatatctcagcatccatacctagtgatgtaggcatctacttctgtgctgggcatggcggtaaccagttctattttgggacagggacaagtttgacggtcattccaaatatccagaaccctgaccctgccgtctgtctcttatacacatctccgagcccacgagacgtagaggaatctcgtatgccgtcttctgcttgaaaaaaa

SEQ ID NO: 55 - DNA, 652 bp, synthetic construct
  source 1..652: mol_type = other DNA
acggcagcgttacacgacgctcttccgatctgggggttcatatgtaaaatgaagggtctgtggaaggacatgaataaagcacaggaggttgaagtcagatttgcagctttctaggcaggagataagacaatctgcatcttcacaggagggatggccatgctcctgggggcatcagtgctgattctgtggcttcaacaggagggatggccatgctcctgggggcatcagtgctgattctgtggcttcagccagactgggtaaacagtcaacagaagaatgatgaccagcaagttaagcaaaattcaccatccctgagcgtccaggaaggaagaatttctattctgaactgtgactatactaacagcatgtttgattatttcctatggtacaaaaaataccctgctgaaggtcctacattcctgatatctataagttccattaaggataaaaatgaagatggaagattcactgttttcttaaacaaaagtgccaagcacctctctctgcacattgtgccctcccagcctggagactctgcagtgtacttctgtgcagcagggaaaaatagtggaggtagcaactataaactgacatttggaaaaggaactctcttaaccgtgaatccaaatatccagaaccctgaccctgccgt

SEQ ID NO: 56 - DNA, 481 bp, synthetic construct
  source 1..481: mol_type = other DNA
gggggagagtaattctagccaccatatgaggcaagtggcgagagtgatcgtgttcctgaccctgagtactttgagccttgctaagaccacccagcccatctccatggactcatatgaaggacaagaagtgaacataacctgtagccacaacaacattgctacaaatgattatatcacgtggtaccaacagtttcccaaagacaaaagttacaaacgaagtggcctcctgtttatccctgccgacagaaagtccagcactctgagcctgccccgggtttccctgagcgacactgctgtgtactactgcctcgtgggtgaccccaaagctgcaggcaacaagctgacttttggaggaggaaccagggtgctggttaaaccaaatatccagaaccctgaccctgccgtctgtctcttatacacatctccgagcccacgagacatctcaggatctcgtatgccgtcttctgcttgaaaaaaaaaa

SEQ ID NO: 57 - DNA, 792 bp, synthetic construct
  source 1..792: mol_type = other DNA
gggactagtagctgttgcttctgttctctggaaattctttaaacctagaatcagacacaaaaactgaactctgggtccacaatcctcatttgtccttgaagtatgaggctggtggcaagagtaactgtgtttctgacctttggaactataattgatgctaagaccacccagcccacctcgctgaaggaagagctgcaaacctgccttgtaatcactctaccatcagtggaaatgagtatgtgtattggtatcgacagattcactcccaggggggactagtagctgttgcttctgttctctggaaattctttaaacctagaatcagacacaaaaactgaactctgggtccacaatcctcatttgtccttgaagtatgaggctggtggcaagagtaactgtgtttctgacctttggaactataattgatgctaagaccacccagcccacctccatggattgcgctgaaggaagagctgcaaacctgccttgtaatcactctaccatcagtggaaatgagtatgtgtattggtatcgacagattcactcccaggggccacagtatatcattcatggtctaaaaaacaatgaaaccaatgaaatggcctctctgatcatcacagaagacagaaagtccagcaccttgatcctgccccacgctacgctgagagacactgctgtgtactattgcatcgtgagagaggccctgggatctagtcccgggtatgcactcaacttcggcaaaggcacctcgctgttggtcacaccccatatccagaaccctgaccctgccgt

SEQ ID NO: 58 - DNA, 437 bp, synthetic construct
  source 1..437: mol_type = other DNA
ggggggagagtaattctagccaccatatgctgactgccagcctgttgagggcagtcatagcctccatctgtgttgtatccagcatggctcagaaggtaactcaagcgcagactgaaatttctgtggtggagaaggaggatgtgaccttggactgtgtttgnngagcaaaatgaaataagtggtcggtattcttggaacttccaccagttccttcaacttcaccatcacagcctcacaagtcgtggactcagcagtatacttctgtgctctgagtgaggccggttctgcaaggcaactgacctttggatctgggacacaattgactgttctgcctgatatccagaaccctgaccctgccgtctgtctcttatacacatctccgagcccacgagaccgtactagatctcgtatgccgtcttctgcttgaaaaaaaaaaa

SEQ ID NO: 59 - DNA, 570 bp, synthetic construct
  source 1..570: mol_type = other DNA
tacacgacgctcttccgatctggggagctggttgggaagactggaagaccacctgggctgtcattgagctctggtgccaggnnagctggttgggaagactggaagaccacctgggctgtcattgagctctggtgccaggaggaatggacaagatcttaggagcatcatttttagttctgtggcttcaactatgctgggtgagtggccaacagaaggagaaaagtgaccagcagcaggtgaaacaaagtcctcaatctttgatatcnnnnataaactgtgcttatgagaacactgcgtttgactactttccatggtaccaacaattccctgggaaaggccctgcattattgatagccatacgtccagatgtgagtgaaaagaaagaaggaagattcacaatctccttcaataaaagtgccaagcagttctcattgcatatcatggattcccagcctggagactcagccacctacttctgtgcagcaaggtacacctacaaatacatctttggaacaggcaccaggctgaaggttttagcaaatatccagaaccctgaccctgccgttntcg

SEQ ID NO: 60 - DNA, 679 bp, synthetic construct
  source 1..679: mol_type = other DNA
ttacacgacgctcttccgatctggggtagattctggctgatgatgtcactgacacaaaggaaaaaatgcaaaacaggtagtcttaaataagcattctggtgagaccaactgcattttggccatggctttgcagagcactctgggggcggtgtggctagggcttctcctcaactctctangctcttccgatctggggtagattctggctgatgatgtcactgacacaaaggaaaaaatggnattttggccatggctttgcagagcactctgggggcggtgtggctagggcttctcctcaactctctctggaaggttgcagaaagcaaggaccaagtgtttcagccttccacagtggcatcttcagagggagctgtggtggaaatcttctgtaatcactctgtgtccaatgcttacaacttcttctggtaccttcacttcccgggatgtgcaccaagactccttgttaaaggctcaaagccttctcagcagggacgatacaacatgacctatgaacggttctcttcatcgctgctcatcctccaggtgcgggaggcagatgctgctgtttactactgtgctgtggaggatccctataaccagggaggaaagcttatcttcggacagggaacggagttatctgtgaaacccaatatccagaaccctgaccctgccgtnncgt

SEQ ID NO: 61 - DNA, 707 bp, synthetic construct
  source 1..707: mol_type = other DNA
ggatcaaaattgtgctccacagagagaagataccggtgtcgggaagcaccagtgccctgaggaagggccatttccaaaagccctgtgctgacacagggttgctggttcctcttcaagagcccactctctggggtggggccatatctccagcagaggtgggctggaaaggacccccccagtcccgcccgccgtgagcttagctggagccatggcctctgcacccatctcgatgcttgcgatgctcttcacattgagtggntgagagctcagtcagtggncagccggaagatcaggtcaacgttgctgaagggaatcctctgactgtacacgacgctcttccgatctgggatccacctctctgtcagagtgtcaacgttgctgaagggaatcctctgactgtgaaatgctattcagtctctggaaacccttatcttttttggtatgttcaataccccaaccgaggcctccagttccttctgaaatacatcacaggggataacctggttaaaggcagctatggctttgaagctgaatttaacaagagccaaacctccttccacctgaagaaaccatctgcccttgtgagcgactccgctttgtacttctgtgctgtgagggcccttggggctgggagttaccaactcactttcgggaaggggaccaaactctcggtcataccaaatatccagaaccctgaccctgccgtt

SEQ ID NO: 62 - DNA, 577 bp, synthetic construct
  source 1..577: mol_type = other DNA
ttacacgacgctcttccgatctggggagttgagggtgaatttacagagtttcagctggttgggaagactggaagaccacctgggctgtcattgagctctggtgccaggaggaatggacaagatcttaggagcatcatttttagttcttacacgacgctcttccgatctgggtngggaagactggaagaccacctgggctgtcattgagctctggtgccaggaggaatggacaagatcttaggagcatcatttttagttctgtggcttcaactatgctgggtgagtggccaacagaaggagaaaagtgaccagcagcaggtgaaacaaagtcctcaatctttgatagtccagaaaggagggatttcaaatatcatggattcccagcctggagactcagccacctacttctgtgcagcaattagacctatcgacaagctcatctttgggactgggaccagattacaagtctttccaaatatccagaaccctgaccctgccgtctgtctcttatacacatctccgagcccacgagactaggcatgatctcgtatgccgtcttctgcttgaaaaaaaaaaa

SEQ ID NO: 63 - DNA, 805 bp, synthetic construct
  source 1..805: mol_type = other DNA
ttacacgacgctcttccgatctgggcaaaattcaagttcgcagatgcaaatcaagagccaaccatgcaagcagtcccttctaaggccagcagtctcaggcccgctgtgtcaactcttttctatacgtgcacatacacacagtgacacttccatgagcacaagggatgtccttcactctctagcacctctagaccctttctagtctagacaatggctgagggattatgagagtgggccgggacaatgacatcacagaccatcaacccactgcctggtcctgggagaagacctattctttcttcaaagnacttcaaagcagccatgggaatcactggctgtaggcctcgtagatgtgaaagtaacccagagctcgagatatctagtcaaaaggacgggagagaaagtttttctggaatgtgtccaggatatggaccatgaaaatatgttctggtatcgacaagacccaggtctggggctacggctgatctatttctcatatgatgttaaaatgaaagaaaaaggagatattcctgaggggtacagtgtctctagagagaagaaggagcgcttctccctgattctggagtccgccagcaccaaccagacatctatgtacctctgtgccagcaggcttaagcgggagggctcctacaatgagcagttcttcgggccagggacacggctcaccgtgctagaggacctgaaaaacgtgttcccacccgaggtcgcctgtctcttatacacatctccgagcccacgagactcctgagcagctcgtatgccgtcttctgcttgaaaaaaaaaa

SEQ ID NO: 64 - DNA, 584 bp, synthetic construct
  source 1..584: mol_type = other DNA
tacacgtacacgacgctcttccgatctgggacagatacagaagacccctccgtcatgcagcatctgccatgagcatcggcctcctgtgctgtcntntnngcaggtccagtgaatgctggtgtcactcagaccccaaaattccaggtcctgaagacaggacagagcatgacactgcagtgtgcccaggatatgaaccatgaatacatgtcctggtatcgacaagacccaggcatggggctgaggctgattcattactcagttggtgctggtatcactgaccaaggagaagtccccaatggctacaatgtctccagatcaaccacagaggatttcccgctcaggctgctgtcggctgctccctcccagacatctgtgtacttctgtgccagcagtcccgcagagactagcaatcagccccagcattttggtgatgggactcgactctccatcctagaggacctgaacaaggtgttcccacccgaggtcgcctgtctcttatacacatctccgagcccacgagacggactcctatctcgtatgccgtcttctgcttgaaaaaaaaaaaacaaaacacaactcagaac

SEQ ID NO: 65 - DNA, 506 bp, synthetic construct
  source 1..506: mol_type = other DNA
atgctcacagagggcctggtctagaatattccacatctgctctcactctgccatgcactctgccatggactcctggaccttctgctgtgtgtccctttgcatcctggtagcgaagcatacagatgctggagttatccagtcaccccgccatgaggtgacagagatgggacaagaagtgactctgagatgtaaaccaatttcaggccatnnnnntaacaacaacgttccgatagatgattcagggatgcccgaggatcgattctcagctaagatgcctaatgcatcattctccactctgaagatccagccctcagaacccagggactcagctgtgtacttctgtgccagcagtttagaagggggcggctatgagcagttcttcgggccagggacacggctcaccgtgctagaggacctgaaaaacgtgttcccacccgaggctgtctcttatacacatctccgagcccacgagacggactcctaatgccgctttctgcttggaaaaa

SEQ ID NO: 66 - DNA, 618 bp, synthetic construct
  source 1..618: mol_type = other DNA
tacacgacgctcttccgatctcccaaatagctgaagaggtggagacgttacagaaaccacctggagcccccagaactggcagacacctgcctgatgctgccatgggcccccagctcagaactggcagacacctgcctgatgctgccatgggcccccagctccttggctatgtggtcctttgccttctaggagcaggccccctggaagcccaagtgacccagaacccaagatacctcatcacagtgactggaaagaagttaacagtgacttgttctcagaatatgaaccatgagtatatgtcctggtatcgacaagacccagggctgggcttaaggcagatctactattcaatgaatgttgaggtgactgataagggagatgttcctgaagggtacaaagtctctcgaaaagagaagaggaatttccccctgatcctggagtcgcccagccccaaccagacctctctgtacttctgtgccagcagtttttccctagcgggaaacgagcagttcttcgggccagggacacggctcaccgtgctagaggacctgaaaaacgtgttcccacccgaggtcgcccagcccagcctgcacgaccccagaaccctgaccctgccgt

SEQ ID NO: 67 - DNA, 530 bp, synthetic construct
  source 1..530: mol_type = other DNA
tacacgacgctcttccgatctggggactgtgccatgggacccaggcccctcttctggacactgctttgtctccttggaacaggtattacacgacgctcttccgatctggggactgtgccatgggacccaggctcctcttctgggcactgctttgtctcctcggaacaggcccagtggaggctggagtcacacaaagtcccacacacctgatcaaaacgagaggacagcaagcgactgggcacaccagtgtgtactggtaccaacaggccctgggtctgggcctccagttcctcctttggtatgacgagggtgaagagagaaacagagnaaacttccctcctagattttcaggtcgccagttccctaattatagctctgagctgaatgtgaacgccttggagctggaggactcggccctgtatctctgtgccagcagttacggacagggcggcactgaagctttctttggacaaggcaccagactcacagttgtagaggacctgaacaaggtgttcccacccgaggtcgcc

SEQ ID NO: 68 - DNA, 516 bp, synthetic construct
  source 1..516: mol_type = other DNA
gnncnnggnctagaatattccacatctgctctcactctgccatggactcctggaccttctgtacntacacgacgctcttccgatctctcactctgccatggactcctggaccttctgctgtgtgtccctttgcatcctggtagcgaagcatacgagttatccagtcaccccgccatgaggtgacagagatgggacaagaagtgactctgagatgtaaaccaatttcaggccagttgctcatttactttaacaacaacgttccgatagatgattcagggatgcccgaggatcgattctcagctaagatgcctaatgcatcattctccactctgaagatccagccctcagaacccagggactcagctgtgtacttctgtgccagcagctccccaggggatccaaacattcagtacttcggcgccgggacccggctctcagtgctggaggacctgaaaaacgtgttcccacccgaggtcgcctgtctcttatacacatctccgagcccacgagaccgag

SEQ ID NO: 69 - DNA, 681 bp, synthetic construct
  source 1..681: mol_type = other DNA
ggnagatgcaaatcaagagccaaccatgcaagcagtcccttctaaggccagcagtctcaggcccgctgtgtcaactcttttctatacacagtgacacttccatgagcacaagggatgtccttcactctctagcacctctagaccctttctagtctagacaatggctgagggattatgagagtgggccgggacaatgacatcacagaccatcaacccactgcctggtcctgggagaagacctattctttcttcaaagcagctttgtttcctggctgtaggcctcgtagatgtgaaagtaacccagagctcgagatatctagtcaaaaggacgggagagaaagtttttctggaatgtgtccaggatatggaccatgaaaatatgttctggtatcgaccaggtctggggctacggctgatctatttctcatatgatgttaaaatgaaagaaaaaggagatattcctgaggggtacagtgtctctagagagaagaaggagcgcttctccctgattctggagtccgccagcaccaaccagacatctatgtacctctgtgccagcaaggaaccctctggggccaacgtcctgactttcggggccggcagcaggctgaccgtgctggaggacctgaaaaacgtgttcccacccgaggtcgcctgtctcttatacacatctccgagccc

SEQ ID NO: 70 - DNA, 265 bp, synthetic construct
  source 1..265: mol_type = other DNA
tacacgacgctcttccgatctgggctctactctgaagatccagcctgcagagcagggggactcggccgtgtatgtctgtgcaagtcgagctaagtcccctcttcacggggccaacgtcctgactttcggggccggcagcaggctgaccgtgctggaggacctgaaaaacgtgttcccacccgaggtcgcctgtctcttatacacatctccgagcccacgagacgtagaggaatctcgtatgccgtcttctgcttgaaaaaaaaaa

SEQ ID NO: 71 - DNA, 572 bp, synthetic construct
  source 1..572: mol_type = other DNA
tacacgacgctcttccgatctggggatccttccctgaccctgccatgggcaccaggctcctctgctgggcggccctctgtctcctgggagcttacacgacgctcttccgatctggggatccttccctgaccctgccatgggcaccagggnctcctgggagcagaactcacagaagctggagttgcccagtctcccagatataagattatagagaaaaggcagagtgtggctttttggtgcaatcctatatctggccatgctaccctttactggtaccagcagatcctgggacagggcccaaagcttctgattcagtttcagaataacggtgtagtggatgattcacagttgcctaaggatcgattttctgcagagaggctcaaaggagtagactccactctcaagatccagcctgcaaagcttgaggactcggccgtgtatctctgtgccagcagcagggggccctcaactaatgaaaaactgttttttggcagtggaacccagctctctgtcttggaggacctgaacaaggtgttcccacccgaggtcgcctgtctcccacccgaggtcgc

SEQ ID NO: 72 - DNA, 592 bp, synthetic construct
  source 1..592: mol_type = other DNA
tacacgacgctcttccgatctgggatctcagacccgaggctagcatgggctgcaggctgctctgntgtgcggttctctgtctcctgnnnncgncgctcttccgatctggttacacgacgctcttccgatctgggatctcagacccgaggctagcatgggctgcaggctgctctgctgtgcggttctctgtctcctgggagcggtccccatggaaacgggagttacgcagacaccaagacacctggtcatgggaatgacaaataagaagtctttgaaatgtgaacaacatctggggcataacgctatgtattggtacaagcaaagtgctaagaagccactggagctcatgtttgtctacaactttaaagaacagactgaaaacaacagtgtgccaagtcgcttctcacctgaatgccccaacagctctcacttattccttcacctacacaccctgcagccagaagactcggccctgtatctctgtgccagcagcccagagttagcgggagggtacaatgagcagttcttcgggccagggacacggctcaccgtgctagaggacctgaaaaacgtgttcccacccgaggtcgcc

SEQ ID NO: 73 - DNA, 625 bp, synthetic construct
  source 1..625: mol_type = other DNA
gggagagatgagatcctggcctggacctgaaatgggcacaaggtttacacgacgctcttgggagagatgagatcctggcctggacctgaaatgggcacaaggttgttcttctatgtggccctttgtctcctgtggacaggacacatggatgctggaatcacccagagcccaagacacaaggtcacagagacaggaacaccagtgactctgagatgtcatcagactgagaaccaccgctatatgtactggtatcgacaagacccggggcatgggctgaggctgatccattactcatatggtgttaaagatactgacaaaggagaagtctcagatggctatagtgtctctagatcaaagacagaggatttcctcctcactctggagtccgctaccagctcccagacatctgtgtacttctgtgccatcagtgaatcagcggcctcctacaatgagcagttcttcgggccagggacacggctcaccgtgctagaggacctgaaaaacgtgttcccacccgaggtcgccnntctctnatacacatctccgagnccacgagacttaggcgatgctcgtacgccggtgtctgtttgaaattaaaatgatacaaacagaagcctgacgcagg

SEQ ID NO: 74 - DNA, 746 bp, synthetic construct
  source 1..746: mol_type = other DNA
ttacacgacgctcttccgatctgggaggaaaagcaaggctgagaatttagctctttcccaggaggaccaagccctgagcacagacacagtgctgcctgcccctttgtgccatgggctccaggctgctctacacgacgctcttgaggaaaagcaaggctgagaatttagctctttcccaggaggaccaagccctgagcacagacacagtgctgcctgcccctttgtgccatgggctccaggctgctctgttgggtgctgctttgtctcctgggagcaggcccagtaaaggctggagtcactcaaactccaagatatctgatcaaaacgagaggacagcaagtgacactgagctgctcccctatctctgggcataggagtgtatcctggtaccaacagaccccaggacagggccttcagttcctctttgaatacttcagtgagacacagagaaacaaaggaaacttccctggtcgattctcagggcgccagttctctaactctcgctctgagatgaatgtgagcaccttggagctgggggactcggccctttatctttgcgccagcagcatgcgacagggcattcaagagacccagtacttcgggccaggcacgcggctcctggtgctcgaggacctgaaaaacgtgttcccacccgaggtcgcctgtctcttatacacatctccgagcccacgagactaggcatgatctcgtatgccgtcttctgcttgaaaaaaaaaaaatccaaa

SEQ ID NO: 75 - DNA, 623 bp, synthetic construct
  source 1..623: mol_type = other DNA
tacacgacgctcttccgatctggggagtcctctcaccactgcagaccagaatcctgccctgggccttgcctgtctgcctcactctgccaggggctgcaggctcctctgctgtgtntacacgacgctcttccgatctggggagtcctctcaccactgcagaccagaatcctgactctgccatgggctgcaggctcctctgctgtgtggtcttctgcctcctccaagcaggtcccttggacacagctgtttcccagactccaaaatacctggtcacacagatgggaaacgacaagtccattaaatgtgaacaaaatctgggccatgatactatgtattggtataaacaggactctaagaaatttctgaagataatgtttagctacaataataaggagctcattataaatgaaacagttccaaatcgcttctcacctaaatctccagacaaagctcacttaaatcttcacatcaattccctggagcttggtgactctgctgtgtatttctgtgccagcagccccttcccgccggacaggggaccctacaatgagcagttcttcgggccagggacacggctcaccgtgctagaggacctgaaaaacgtgttcccacccgaggtcgcc

SEQ ID NO: 76 - DNA, 588 bp, synthetic construct
  source 1..588: mol_type = other DNA
tacacgacgctcttccgatctgggaaaaggaccccagtcagaggccccatctcagacccgaggctagcatgggctgcaggctgtacacgacgctcttccgatctgggaaaaggaccccagtcagaggccccatctcagacccgaggctagcatgggctgcaggctgctctgctgtgcggttctctgtctcctgggagcagttcccatagacactgaagttacccagacaccaaaacacctggtcatggaaatgacaaataagaagtctttgaaatgtgaacaacatatggggcacagggctatgtattggtacaagcagaaagctaagaagccaccggagctcatgtttgtctacagctatgagaaactctctataaatgaaagtgtgccaagtcgcttctcacctgaatgccccaacagctctctcttaaaccttcacctacacgccctgcagccagaagactcagccctgtatctctgcgccagcagccttcggtctagcggggatgggacccagtacttcgggccaggcacgcggctcctggtgctcgaggacctgaaaaacgtgttcccacccgaggtcgccgc

SEQ ID NO: 77 - DNA, 680 bp, synthetic construct
  source 1..680: mol_type = other DNA
gtcctgtctcctcatctgcaaaattaggaagcctgtcttgattatctccaggaacctcccacctcttcattccagcctctgacaaactctgcacattaggccaggagaagcccccgagccaagtctcttttctcattctcttccaacaagtgcttggagctccaagaaggccccctttgcactatgagcaaccaggtgctctgctgtgtggtcccaagtgcttggagctccaagaaggccccctttgcactatgagcaaccaggtgctctgctgtgtggtcctttgtttcctgggagcaaacaccgtggatggtggaatcactcagnccccaaagtacctgttcagaaaggaaggacagaatgtgaccctgagttgtgaacagaatttgaaccacgatgccatgtactggtaccgacaggacccagggcaagggctgagattgatctactactcacagatagtaaatgactttcagaaaggagatatagctgaagggtacagcgtctctcgggagaagaaggaatcctttcctctcactgtgacatcggcccaaaagaacccgacagctttctatctctgtgccaccagcgggagctcctacaatgagcagttcttcgggccagggacacggctcaccgtgctagaggacctgaaaaacgtgttcccacccgaggtcgcc

SEQ ID NO: 78 - DNA, 679 bp, synthetic construct
  source 1..679: mol_type = other DNA
tacacgacgctcttccgatctggggagacaaaggcattcttcccattcaaacggttcaccggtgcatgaatcttgaatttgaccatctggggaaggggcgtggcctctcctgacagacccccttgagagtactgttagaagacccctccatcctgtagcacctgccatgagcatcgggctcctgtgctgtgtggccttttctctcctgtgggcaagtccagtgaatgctggtgtcactcagaccccaaaattccaggtcctgaagacaggacagagcatgacactgcagtgtgcccaggatatgaaccataactccatgtactggtatcgacaagacccaggcatgggactgaggctgatttattactcagcttctgagggtaccactgacaaaggagaagtccccaatggctacaatgtctccagattaaacaaacgggagttctcgctcaggctggagtcggctgctccctcccagacatctgtgtacttctgtgccagctcagagagggaagtccagccccagcattttggtgatgggactcgactctccatcctagaggacctgaacaaggtgttcccacccgaggtcgcctgtctcttatacacatctccgagcccacgagaccgtactagatctcgtatgccgtcttctgcttgaaaaaaaaaaaaacaagaa

SEQ ID NO: 79 - DNA, 602 bp, synthetic construct
  source 1..602: mol_type = other DNA
tacacgacgctcttccgatctggggaggagcagtgacatcacaggaaaaaccaccaaccaaggccaaggagaccagagnnagaggccccatctcagacccgaggctagcctgtctcctgggagcgggattacacgnnagaggccccatctcagacccgaggctagcatgggctgcaggctgctctgctgtgcggttctctgtctcctgggagcggtccccatggaaacgggagttacgcagacaccaagacacctggtcatgggaatgacaaataagaagtctttgaaatgtgaacaacatctggggcataacgctatgtattggtacaagcaaagtgctaagaagccactggagctcatgtttgtctacaactttaaagaacagactgaaaacaacagtgtgccaagtcgcttctcacctgaatgccccaacagctctcacttattccttcacctacacaccctgcagccagaagactcggccctgtatctctgtgccagcagggagggggttctgaacaccggggagctgttttttggagaaggctctaggctgaccgtactggaggacctgaaaaacgtgttcccacccgaggtcgccc

SEQ ID NO: 80 - DNA, 606 bp, synthetic construct
  source 1..606: mol_type = other DNA
tacacgacgctcttccgatctgggagtcctctcaccactgcagaccagaatcctgccctgggccttgcctggtctgcctcactctgccatgggctgcaggctcctctgctgtgtgttacacgacgctcttccgatctgggagtcctctcaccactgcagnncaactctgccatgggctgcaggctcctctgctgtgtggtcttctgcctcctccaagcaggtcccttggacacagctgtttcccagactccaaaatacctggtcacacagatgggaaacgacaagtccattaaatgtgaacaaaatctgggccatgatactatgtattggtataaacaggactctaagaaatttctgaagataatgtttagctacaataataaggagctcattataaatgaaacagttccaaatcgcttctcacctaaatctccagacaaagctcacttaaatcttcacatcaattccctggagcttggtgactctgctgtgtatttctgtgccagcagacggactagcggatcctacaatgagcagttcttcgggccagggacacggctcaccgtgctagaggacctgaaaaacgtgttcccacccgaggtcgcc

SEQ ID NO: 81 - DNA, 479 bp, synthetic construct
  source 1..479: mol_type = other DNA
tacacgacgctcttccgatctggggattctgccagaccttgcctgtggggccatgggagctcaaaatcaatttttagtctcttgaaagcaggactcacagaacctgaagtcacccagactcccagccatcaggtcacacagatgggacaggaagtgatcttgcgctgtgtccccatctctaatcacttatacttctattggtacagacaaatcttggggcagaaagtcgagtttctggtttccttttataataatgaaatctcagagaagtctgaaatattcgatgatcaattctcagttgaaaggcctgatggatcaaatttcactctgaagatccggtccacaaagctggaggactcagccatgtacttctgtgccagcagtgaatttctcgacacagatacgcagtattttggcccaggcacccggctgacagtgctcgaggacctgaaaaacgtgttcccacccgaggtcgccgc

SEQ ID NO: 82 - DNA, 781 bp, synthetic construct
  source 1..781: mol_type = other DNA
tacacgacgctcttccgatctgggggcagatgcaaatcaagagccaaccatgcaagcagtcccttctaaggnnnncgnnaactcttttctatacgtgcacatacacacagtgacacttccatgagcacaagggatgtccttcactctctagcacctctagaccctttctagtctagacaatggctgagggattatgagagtgggccgggacaatgacatcacagaccatcaacccactgcctggtcctgggagaagacctattctttcttcaaagcagccatgggaatcaggctcctctgtcgtgtggccttttgtttcctggctgtanggcctcgcttcaaagcagccatgggaatcaggctcctctgtcgtgtggccttttgtttcctggctgtaggcctcgtagatgtgaaagtaacccagagctcgagatatctagtcaaaaggacgggagagaaagtttttctggaatgtgtccaggatatggaccatgaaaatatgttctggtatcgacaagacccaggtctggggctacggctgatctatttctcatatgtctggngtccgccagcaccaaccagacatctatgtacctctgtgccagcagccggctagcgggttcgtacaatgagcagttcttcgggccagggacacggctcaccgtgctagaggacctgaaaaacgtgttcccacccgaggtcgcctgtctcttatacacatctccgagcccacgagacatctcaggatctcgtatgccgtcttctgcttgaaaaaaaaaaa

SEQ ID NO: 83 - DNA, 604 bp, synthetic construct
  source 1..604: mol_type = other DNA
tacacgacgctcttccgatctggggatccttgggattctgtgatcagtcatccctcctcgctggtgaatggaggcagtggtcacaactctccccagagaaggtggtgtgaggccatcacggaagatgctgctgcttctgctgcttctggggccaggtacacgacgctcttccgatctggggatccttgggattctgtgatctgctgcttctggggccaggctccgggcttggtgctgtcgtctctcaacatccgagctgggttatctgtaagagtggaacctctggatcgagtgccgttccctggactttcaggccacaactatgttttggtatcgtcagttcccgaaacagagtctcatgctgatggcaacttccaatgagggctccaaggccacatacgagcaaggcgtcgagaaggacaagtttctcatcaaccatgcaagcctgaccttgtccactctgacagtgaccagtgcccatcctgaagacagcagcttctacatctgcagtgctagagtcgggggctacgagcagtacttcgggccgggcaccaggctcacggtcacagaggacctgaaaaacgtgttcccacccgaggtcgcc

SEQ ID NO: 84 - DNA, 562 bp, synthetic construct
  source 1..562: mol_type = other DNA
tacaagacgctcttccgatctgggggaactacgctgtaggaaggaaagatgaacttgagtttcactgcttagtgacttttctcaggggagaggccatcacttgaagatgctgagtcttctccttcttctcctgggactaggtccnnngactangctntgtnttcngnncnntcnnctnncannagccaagcagggatatctgtcaacgtggaacctccctgacgatccagtgtcaagtcgatagccaagtcaccatgatgttctggtaccgtcagcaacctggacagagcctgacactgatcgcaactgcaaatcagggctctgaggccacatatgagagtggatttgtcattgacaagtttccgaagacagcagcatatatctctgcagcgtgacagcggggacctacgagcagtacttcgggccgggcaccaggctcacggtcacagaggacctgaaaaacgtgttcccacccgaggtcgcctgtctcttatacacatctccgagcccacgagaccgtactagatctcgtatgccgtcttctgcttgaaaaaaaaaaaaa

SEQ ID NO: 85 - DNA, 377 bp, synthetic construct
  source 1..377: mol_type = other DNA
gacnangctnngtnttcngnncnntcnnctnncannagccaagcagggatatctgtcaacgtggaacctccctgacgatccagtgtcaagtcgatagccaagtcaccatgatgttctggtaccgtcagcaacctanctnnnattctcaactctgactgtgagcaacatgagccctgaagacagcagcatatatctctgcagcgttgaagacgggacagggggaagcattcagtacttcggcgccgggacccggctctcagtgctggaggacctgaaaaacgtgttcccacccgaggtcgcctgtctcttatacacatctccgagcccacgagacaggcagaaatctcgtatgccgtcttctgcttgaaaaaaaaaaa

SEQ ID NO: 86 - DNA, 338 bp, synthetic construct
  source 1..338: mol_type = other DNA
tacacgacgctcttccgatctgannnnntgncctggagctgaaatgggcaccaggctcttcttctatgtggccctttgtctgctgtgggcaggacacagggatgctggaatcacccagagcccaagatacaagatcacagagacaggaaggcaggtgaccttgatgcaagacagagaatttccccctcactctggagtcagctacccgctcccagacatctgtgtatttctgcgccagcatgcggaacaccggggagctgttttttggagaaggctctaggctgaccgtactggaggacctgaaaaacgtgttcccacccgaggtcgcctgtctctta

SEQ ID NO: 87 - DNA, 316 bp, synthetic construct
  source 1..316: mol_type = other DNA
cggcgaccaccgagatctacacctaagccttcgtcggcagcgtcagatgtgtataagagacagtacacgacgctcttccgatctggggagctgaatgtgaacgccttgttgctgggggactcggccctctatctctgtgccagcagcttaggagggggggccaatacgcagtattttggcccaggcacccggctgacagtgctcgaggacctgaaaaacgtgttcccacccgaggtcgcctgtctcttatacacatctccgagcccacgagacggactcctatctcgtatgccgtcttctgcttgaaaaaaaaaaa

SEQ ID NO: 88 - DNA, 316 bp, synthetic construct; identical to SEQ ID NO: 87
  source 1..316: mol_type = other DNA

SEQ ID NO: 89 - DNA, 663 bp, synthetic construct
  source 1..663: mol_type = other DNA
tacacgacgctcttccgatctgggaaacagagtgggaaggaactacgctgtaggaaggaaagatgaacttgagtttcacttcttagtgccttttctcaggggagaggccatcacttgaagatgctgagtcttctgctccttctcctgggactaggttacacgacgctcttccgatctgggaaacagagtgggaaggaactacgctgttctcaggggagaggccatcacttgaagatgctgagtcttctgctccttctcctgggactaggctctgtgttcagtgctgtcatctctcaaaagccaagcagggatatctgtcaacgtggaacctccctgacgatccagtgtcaagtcgatagccaagtcaccatgatgttctggtaccgtcagcaacctggacagagcctgacactgatcgcaactgcaaatcagggctctgaggccacatatgagagtggatttgtcattgacaagtttcccatcagccgcccaaacctaacattctcaactctgactgtgagcaacatgagccctgaagacagcagcatatatctctgcagcgttgaagacgggacagttggtaccggggagctgttttttggagaaggctctaggctgaccgtactggaggacctgaaaaacgtgttcccacccgaggtcgcc

SEQ ID NO: 90 - DNA, 575 bp, synthetic construct
  source 1..575: mol_type = other DNA
acagtgatcctgatctggtaaagctcccatcctgccctgaccctgccatgggcaccaggctcctcttctgggtggccttctgtctcctgggggcagatgaacagtgatcctgatctggtaaagctcccatcctgccctgaccctgccatgggcaccaggctcctcttctgggtggccttctgtctcctgggggcagatcacacaggagctggagtctcccagtcccccagtaacaaggtcacagagaagggaaaggatgtagagctcaggtgtgatccaatttcaggcnnnngacaaatcagggctgcccagtgatcgcttctctgcagagaggactgggggatccgtctccactctgacgatccagcgcacacagcaggaggactcggccgtgtatctctgtgccagcagctttcatgcgacagggaataattcacccctccactttgggaatgggaccaggctcactgtgacagaggacctgaacaaggtgttcccacccgaggtcgcctgtctcttatacacatctccgagcccacgagaccgaggctgancttgaaaaaaaaaaaaaaaaa

SEQ ID NO: 91 - DNA, 555 bp, synthetic construct
  source 1..555: mol_type = other DNA
tacacgacgctcttccgatctgggactgagaacctaagttgggagagatgagatcctggcctggacctgaaatgggcacaaggttgtacacgacgctcttccgatctgggactgagaacctcctggcctggacctgaaatgggcacaaggttgtggccctttgtctcctgtggacaggacacatggatgctggaatcacccagagcccaagacacaaggtcacagagacaggaacaccagtgactctgagatgtcatcagactgagaaccaccgctatatgtactggtatcgacaagacccggggcatgggctgaggctgatccattactcatatggtgttaaagatactgacaaaggagaagtctcagatggctatagtgtctctagatcaaagacagaggatttcctcctcactctggagtccgctaccagctcccagacatctgtgtacttctgtgccatcagaggaacagggaatgagcagttcttcgggccagggacacggctcaccgtgctagaggacctgaaaaacgtgttcccacccgaggtcgcct

SEQ ID NO: 92 - DNA, 650 bp, synthetic construct
  source 1..650: mol_type = other DNA
tacacgacgctcttccgatctgggctacgctgtaggaaggaaagatgaacttgagtttcacttcttagtgccttttctcaggggagaggccatcacttgaagatgctgagtcttctgctccttctcctgggactagtacacgacgctcttccgatctgggctacgctgtaggaaggtcctgggactaggctctgtgttcagtgctgtcatctctcaaaagccaagcagggatatctgtcaacgtggaacctccctgacgatccagtgtcaagtcgatagccaagtcaccatgatgttctggtaccgtcagcaacctggacagagcctgacactgatcgcaactgcaaatcagggctctgaggccacatatgagagtggatttgtcattgacaagtttcccatcagccgcccaaacctaacattctcaactctgactgtgagcaacatgagccctgaagacagcagcatatatctctgcagcgcagacaggggaacagatacgcagtattttggcccaggcacccggctgacagtgctcgaggacctgaaaaacgtgttcccacccgaggccgtctcttatacacatctccgagcccacgagacgtagaggaatatcgtatgccgtcttctgctttaaaaaaacaaataaa

SEQ ID NO: 93 - DNA, 652 bp, synthetic construct
  source 1..652: mol_type = other DNA
ttacacgacgctcttccgatctgggggtacacttcagccctctgagctgaagtgggagtggtttctctcctgaaaatgtttctgaggcccaaatagctgaagaggtggagacgttacagaaaccacctggagcccccagaactggcagacacctgcctgatgctgccatgggcccccagctccttggctatgtggtggcagacacctgcctgatgctgccatgggcccccagctccttggctatgtggtcctttgccttctaggagcaggccccctggaagcccaagtgacccagaacccaagatacctcatcacagtgactggaaagaagttaacagtgacttgttctcagaatatgaaccatgagtatatgtcctggtatcgacaagacccagggctgggcttaaggcagatctactattcaatgaatgttgaggtgactgataagggagatgttcctgaagggtacaaagtctctcgaaaagagaagaggaatttccccctgatcctggagtcgcccagccccaaccagacctctctgtacttctgtgccagcaaggagcgggagggccgggagacccagtacttcgggccaggcacgcggctcctggtgctcgaggacctgaaaaacgtgttcccacccgaggtcgcc

SEQ ID NO: 94 - DNA, 485 bp, synthetic construct
  source 1..485: mol_type = other DNA
tacacgacgctcttccgatctgggggatctggtaaagcccncatcctggcctgaccctgccatgggcaccagnctcctctgctgggtggtcctgggtttcctagggacagctggcctgaccctgccatgggcaccaggctcctctgctgggtggtcctgggtttcctagggacagatcacacaggtgctggagtctcccagtcccctaggtacaaagtctcccttttttggtaccaacaggccctggggcttatttccagaatgaagctcaactagacaaatcggggctgcccagtgatcgcttctttgcagaaaggcctgagggatccgtctccactctgaagatccagcgcacacagcaggaggactccgccgtgtatctctgtgccagcagcttgcactccggtggtggctacaccttcggttcggggaccaggttaaccgttgtagaggacctgaacaaggtgttcccacccgaggtcgcc

SEQ ID NO: 95 - DNA, 538 bp, synthetic construct
  source 1..538: mol_type = other DNA
cctgccctgaccctgccatgggcaccaggctcctcttctgggtggccttctgtctcctnnngncnntcttccgatctggggattcatacacgacgctcctgccatgggcaccaggctcctcttctgggtggccttctgtctcctgggggcagatcacacaggagctggagtctcccagtcccccagtaacaaggtcacagagaagggaaaggatgtagagctcaggtgtgatccaatttcaggtcatactgccctttactggtaccgacagagcctggggcagggcctggagtttttaatttacttccaaggcaacagtgcaccagacaaatcagggctgcccagtgatcgcttctctgcagagaggactgggggatccgtctccactctgacgatccagcgcacacagcaggaggactcggccgtgtatctctgtgccagcagcgggacagcgaacaccggggagctgttttttggagaaggctctaggctgaccgtactggaggacctgaaaaacgtgttcccacccgaggtcgcc

SEQ ID NO: 96 - DNA, 548 bp, synthetic construct
  source 1..548: mol_type = other DNA
tacacgacgctcttccgatctgggggaatgtctcagaatgacttccttgagagtcctgctcccctttcatcaatgcacagatacagaagaccagaagacccctccgtcatgcagcatctgccatgagcatcggcctcctgtgctgtgcagccttgtctctcctgtgggcaggtccagtgaatgctggtgtcactcagaccccaaaattccaggtcctgaagacaggacagagcatgacactgcagtgtgcccaggatatgaaccatgaatacatgtcctggtatcgacaagacccaggcatggggctgaggctgattcattactcagttggtgctggtatcactgaccaaggagaagtccccaatggctacaatgtctccagatcaaccacagaggatttcccgctcaggctgctgtcggctgctccctcccagacatctgtgtacttctgtgccagcaattctttctcgggaccaccgtacttcgggccaggcacgcggctcctggtgctcgaggacctgaaaaacgtgttcccacccgaggtcgcc

SEQ ID NO: 97 - DNA, 564 bp, synthetic construct
  source 1..564: mol_type = other DNA
ggggtcactgtgggaacttccgtgtaaggacggggcgtccctcctcctctgctcctgctcacagtgatcctgatctggtaaagctcccatcctgccctgaccctgccatgggcaccaggctcctcttctctgaccctgccatgggcaccaggctcctcttctgggtggccttctgtctcctgggggcagatcacacaggagctggagtctcccagtcccccagtaacaaggtcacagagaagggaaaggatgtagagctcaggtgtgatccaatttcaggtcatactgccctttactggtaccgacagagcctggggcagggcctggagtttttaatttacttccaaggcaacagtgcaccagacaaatcagggctgcccagtgatcgcttctctgcagagaggactgggggatccgtctccactctgacgatccagcgcacacagcaggaggactcggccgtgtatctctgtgccagcagcttagtaccttgggagcagtacttcgggccgggcaccaggctcacggtcacagaggacctgaaaaacgtgttcccacccgagg

SEQ ID NO: 98 - DNA, 748 bp, synthetic construct
  source 1..748: mol_type = other DNA
tacacgacgctcttccgatctgggggacatataagattggttctcgaaaccataggacccactggaaatggtgacctcacttgtaggaggcagctgtgaggtctggttccccgacgtgctgcagcaagtgcctttgccctgcctgtgggctccctccatggccaactctgctatggacaccagagtactctgctgtgcggtcatctgtcttctgggggcaggtctctcaaatgccggcgtcatgcagaacccaagacacctggtcaggaggaggggacaggaggcagnntnngntgnancncnntnnngnncactccctccatggccaactctgctatggacaccagagtactctgctgtgcggtcatctgtcttctgggggcaggtctctcaaatgccggcgtcatgcagaacccaagacaggacaggaggcaagactgagatgcagcccagtcatgtttactggtatcggcagctcccagaggaaggtctgaaattcatggtttatctccagaaagaaaatatcatagatgagtcaggaatgccaaaggaacgattttctgctgaatttcccaaagagggccccagcatcctgaggatccagcaggtagtgcgaggagattcggcagcttatttctgtgccagctcacctaaccccgggataggcggctacgagcagtacttcgggccgggcaccaggctcacggtcacagaggacctgaaaaacgtgttcccacccgaggtcgcc

SEQ ID NO: 99 - DNA, 727 bp, synthetic construct
  source 1..727: mol_type = other DNA
gcagatgcaaatcaaganncaaaggccagcagtctcaggcccgctgtgtcaactcttttctatacgtgcacatacacacagtgacacttccatgagcacaagggatgtccttcactctctagcacctctagaccctttctagtctagacaatggctgagggattatgagagtgggccgggacaatgacatcacagaccatcaacccactgcctggtcctgggagaagacctattctttcttcaaagcagccatgggaatcaggctcctctgtcgtgtggccttttgtttcctggctgtaggtttcctngctgtaggcctcgtagatgtgaaagtaacccagagctcgagatatctagtcaaaaggacgggagagaaagtttttctggaatgtgtccaggatatggaccatgatctggtatcgacaagacccaggtctggggctacggctgatctatttctcatatgatgttaaaatgaaagaaaaaggagatattcctgaggggtacagtgtctctagagagaagaaggagcgcttctccctgattctggagtccgccagcaccaaccagacatctatgtacctctgtgccagcagtttttttcagggacacaatgagcagttcttcgggccagggacacggctcaccgtgctagaggacctgaaaaacgtgttcccacccgaggtcgcctgtctcttatacacatctccgagcccacgagacggac

SEQ ID NO: 100 - DNA, 658 bp, synthetic construct
  source 1..658: mol_type = other DNA
ttacacgacgctcttccgatctggggctttctagtctagacaatggctgagggattatgagagtgggccgggacaatgacatcacagaccatcaacccactgcctggtcctgggagaagacctattctttcttcaaagcttcaaagcagccatgggaatcaggctctgtcgtgtggccttttgtttcctggctgtaggcctcgtagatgtgaaagtaacccagagctcgagatatctagtcaaaaggacgggagagaaagtttttctggaatgtgtccaggatatggaccatgaaaatatgttctggtatcgacaagacccaggtctggggctacggctgatctatttccatatgatgttaaaatgaaagaaaaaggagatattcctgaggggtacagtgtctctagagagaagaaggagcgcttctccctgattctggagtccgccagcaccaaccagacatctatgtacctctgtgccagctgggggactctctctggggccaacgtcctgactttcggggccggcagcaggctgaccgtgctggaggacctgaaaaacgtgttcccacccgaggtcgcctgtctcttatacacatctccgagcccacgagactaggcatgatctcgtatgccgtcttctgcttgaaaaaaaaaaa

SEQ ID NO: 101 - DNA, 478 bp, synthetic construct
  source 1..478: mol_type = other DNA
tngnncatgctcacagagggcctggtctagaatattccacatctgctctcactctgccatggactccttacacgacgctctactcctgnaccttctnctgtntgnctngnnaagcatacagatgctggagttanccagtcaccccgccatgaggtgacagagatgggacaagaagtgactctgagatgtaaaccatnnngnggggactggagttgctcatttactttaacaacaacgttccgatagatgattcagggatgcccgaggatcgattctcagctaagatgcctaatgcatcattctccactctgaagatccagccctcagaacccagggactcagctgtgtacttctgtgccagcagtccagggttacggagcaatcagccccagcattttggtgatgggactcgactctccatcctagaggacctgaacaaggtgttcccacccgaggtcgcctgtctcttatacacatc

SEQ ID NO: 102 - DNA, 532 bp, synthetic construct
  source 1..532: mol_type = other DNA
gcagaccagaatcctgccctgggccttgcctggtctgcctcactctgccatgggctgcaggctcctctgctgtacacactctgccatgggctgcaggctcctctgctgtgtggtcttctgcctcctccaagcaggtcccttggacacagctgtttcccagactccaaaatacctggtcacacagatgggaaacgacaagtccattaaatgtgaacaaaatctgggccatgatactatgtattggtataaacaggactctaagaaatttctgaagataatgtttagctacaataataaggagctcattataaatgaaacagttccaaatcgcttctcacctaaatctccagacaaagctcacttaaatcttcacatcaattccctggagcttggtgactctgctgtgtatttctgtgccagcagccgagatgacaggctgtttaacactgaagctttctttggacaaggcaccagactcacagttgtagaggacctgaacaaggtgttcccacccgaggtcgccnnaggtcgc

SEQ ID NO: 103 - DNA, 607 bp, synthetic construct
  source 1..607: mol_type = other DNA
tacacgacgctcttccgatctgggtcacagtgatcctgatctggtaaagctcccatcctgccctgaccctgccatgggcaccaggctcctctnctgggtngccttctgtctcctggggggnnacagtgatcctgatctggtaaagctcccatcctgccctgaccctgccatgggcaccaggctcctcttctgggtggccttctgtctcctgggggcatatcacacaggagctggagtctcccagtcccccagtaacaaggtcacagagaagggaaaggatgtagagctcaggtgtgatccaatttcaggtcatactgccctttactggtaccgacagaggctggggcagggcctggagtttttaatttacttccaaggcaacagtgcaccagacaaatcagggctgcccagtgatcgcttctctgcagagaggactggggaatccgtctccactctgacgatccagcgcacacagcaggaggactcggccgtgtatctctgtgccagcacccggacttattctagcacagatacgcagtattttggcccaggcacccggctgacagtgctcgaggacctgaaaaacgtgttcccacccgaggtcgcc

SEQ ID NO: 104 - DNA, 414 bp, synthetic construct
  source 1..414: mol_type = other DNA
cggcgaccaccgagatctacactctctccgtcgtcggtcagatgtgtataagagacagtacacgacgctcttccgatctgggattactcatatggtgttcacgacactaacaaaggagaagtctcagatggctacagtgtctctagatcaaacacagaggacctccccctcactctgtagtctgctgcctcctcccagacatctgtatatttctgcgccagcactcccggactgcagggcccacgtctgtcgcttaatatcagccccagcattttggtgatgggactcgactctccatcctagaggacctgaacaaggtgttcccacccgaggtcgcctgtctcttatacacatctccnagcccacgagacctctctacatctcgtatgccgtcttctgcttgaaaaaaaaaaa

SEQ ID NO: 105 - DNA, 593 bp, synthetic construct
  source 1..593: mol_type = other DNA
gngacacagtgctgcctgcccctttgtgccatgggctccaggctgctctgttgggtgctgctttgtctcctgggagcaggtacacgacgctcttccgatttatnngngacacagtgctgcctgcccctttgtgccatgggctccaggctgctctgttgggtgctgctttgtctcctgggagcaggcccagtaaaggctggagtcactcaaactccaagatatctgatcaaaacgagaggacagcaagtgacactgagctgctcccctatctctgggcataggagtgtatcctggtaccaacagaccccaggacagggccttcagttcctctttgaatacttcagtgagacacagagaaacaaaggaaacttccctggtcgattctcagggcgccagttctctaactctcgctctgagatgaatgtgagcaccttggagctgggggactcggccntttatctttgcgccagcagcttggacagggcatcctacgagcagtacttcgggccgggcaccaggctcacggtcacagaggacctgaaaaacgtgttcccacccgaggtcgcctgacgagtgttcccacccgaggtcgc

SEQ ID NO: 106 - DNA, 500 bp, synthetic construct
  source 1..500: mol_type = other DNA
ttacacgacgctcttccgatctggggagaaacnncnganctggnagacacctgcctgatgctgccatgggcccccagctccttggctatgtggtcctttgccttctaggagcaggccccctggaagcccaagtgacccagaacccaagatacctcatcacagtgactggaaagaagttaacagtgacttgttctcagaatatgaaccatgagtatatgtcctggtatcgacaagacccagggctgggcttaaggcagatctactattcaatgaatgttgaggtgactgataagggagatgttcctgaagggtacaaagtctctcgaaaagagaagaggaatttccccctgatcctggagtcgcccagccccaaccagacctctctgtacttctgtgccagcagtttattgcggacaggggtctacgagcagtacttcgggccgggcaccaggctcacggtcacagaggacctgaaaaacgtgttcccacccgaggtcgcc

SEQ ID NO: 107 - DNA, 619 bp, synthetic construct
  source 1..619: mol_type = other DNA
tacacgacgctcttccgatctggggatcaacccactttcttcaaagcagccatgggaatcaggctcctctgtcgtgtggcnttttgtttcctggctgtaggggccttttgtttcctggctgtaggcctcgtagatgtgaaagtaacccagagctcgagatatctagtcaaaaggacgggagagaaagtttttctggaatgtgtccaggatatggaccatgaaaatatgttctggtatcgacaagacccaggtctggggctacggctgatctatttctcatatgatgttaaaatgaaagaaaaaggagatattcctgaggggtacagtgtctctagagagaagaaggagcgcttctccctgattctggagtccgccagcaccaaccagacatctatgtacctctgtgccagcagcccgacaggggtcgggtcacccctccactttgggaacgggaccaggctcactgtgacagaggacctgaacaaggtgttcccacccgaggtcgcctgtctcttatacaccccacgagacgtagaggaatctcgtatgccgtcttctgcttgaaaaaaaaaaanaaaanaannanaccaacacgtgacatcccccagttaatgagaca

SEQ ID NO: 108 - DNA, 620 bp, synthetic construct
  source 1..620: mol_type = other DNA
tacacgacgctcttccgatctggggctctttcccaggaggtgagcacagacacagtgctgcctgcccctttgtgccatgggctccaggctgctctgttgggtgctgctttgtctcctntacacgacgctcttccgatctggggctctttnncagnnnagacacagtgctgcctgcccctttgtgccatgggctccaggctgctctgttgggtgctgctttgtctcctgggagcaggcccagtaaaggctggagtcactcaaactccaagatatctgatcaaaacgagaggacagcaagtgacactgagctgctcccctatctctgggcataggagtgtatcctggtaccaacagaccccaggacagggccttcagttcctctttgaatacttcagtgagacacagagaaacaaaggaaacttccctggtcgattctcagggcgccagttctctaactctcgctctgagatgaatgtgagcaccttggagctgggggactcggccntttatctttgcgccagcagctggctagccacagaccccgagcagttcttcgggccagggacacggctcaccgtgctagaggacctgaaaaacgtgttcccacccgaggtcgccgc

SEQ ID NO: 109 - DNA, 651 bp, synthetic construct
  source 1..651: mol_type = other DNA
gtacacgacgctcttccgatctgggacatacacacagtgacacttccatgagcacaagggatgtcgnncctttctagtctagacaatggctgagggattatgagagtgggccgggacaatgacatcacagaccatcaacccactgcctggtcctgggagaagacctattctttcttcaaagnattcaaagcagccatgggaatcaggctcctctgtcgtgtggccttttgtttcctggctgtaggcctcgtagatgtgaaagtaacccagagctcgagatatctagtcaaaaggacgggagagaaagtttttctggaatgtgtccaggatatggaccatgaaaatatgttctggtatcgacaagacccaggtctggggctacggctgatctatttctcatatgatgttaaaatgaaagaaaaaggagatattcctgaggggtacagtgtctctagagagaagaaggagcgcttctccctgattctggagtccgccagcaccaaccagacatctatgtacctctgtgccagcacggctagcgggggagttgggaacgagcagtacttcgggccgggcaccaggctcacggtcacagaggacctgaaaaacgtgttcccacccgaggtaacgtgttcccacccgaggtcgccc

SEQ ID NO: 110 - DNA, 543 bp, synthetic construct
  source 1..543: mol_type = other DNA
agacccgaggctagcatgggctgcaggctgctctgctgtgcggttctctgtctcctgggagcaggtcnnnnnagacccgaggctagcatgggctgcaggctgctctgctgtgcggttctctgtctcctgggagcagttcccatagacactgaagttacccagacaccaaaacacctggtcatggnaatgacaaataagaagtctttgaaatgtgaacaacatatggggcacagggctatgtattggtacaagcagaaagctaagaagccaccggagctcatgtttgtctacagctatgagaaactctctataaatgaaagtgtgccaagtcgcttctcacctgaatgccccaacagctctctcttaaaccttcacctacacgccctgcagccagaagactcagccctgtatctctgcgccagcacccttggagggggctcctacgagcagtacttcgggccgggcaccaggctcacggtcacagaggacctgaaaaacgtgttcccacccgaggtcgccnntctcttatacacatctccgagc

SEQ ID NO: 111 - DNA, 768 bp, synthetic construct
  source 1..768: mol_type = other DNA
ttacacgacgctcttccgatctgggggttcagtcctcctcacctttagcttctggcctgtgcaagacaggaatagtacatggagtagcagaacctgaggcctgccaaagagtacagtgggctggagtggcctgcaggggaaagtatgtcggtgtggtgacatcacaggtcaatgctcctatcaggaagaagggagcttaggaacttcagaatgcttactacagagacaccagccccaagctaggagatcctgccatgggcttcaggctcctctgctgtgtggccttttgtctcctgggagcaggtanctnggagatcctgccatgggcttcaggctcctctgctgtgtggccttttgtctcctgggagcaggcccagtggattctggagtcacacaaaccccaaagcacctgatcacagcaactggacagcgagtgacgctgagatgctcccctaggtctggagacctctctgtgtactggtaccaacagagcctggaccagggcctccagttcctcattcagtattataatggagaagagagagnaaaaggaaacattcttgaacgattctccgcacaacagttccctgacttgcactctgaactaaacctgagctctctggagctgggggactcagctttgtatttctgtgccagcagcggaacatctagcgccgaccggaacaccggggagctgttttttggagaaggctctaggctgaccgtactggaggacctgaaaaacgtgttcccacccgaggtcgccgt

SEQ ID NO: 112 - DNA, 628 bp, synthetic construct
  source 1..628: mol_type = other DNA
gaggtctcagaatgacttccttgagagtcctgttcccctttcatcaatgcacagatacagagttcccctttcatcaatgcacagatacagaagacccctccgtcctggagcacctgccatgagcatcagcctcctgtgctgtgcagcctttcctctcctgtgggcaggtccagtgaatgctggtgtcactcagaccccaaaattccgcatcctgaagataggacagagcatgacactgcagtgtacccaggatatgaaccataactacatgtactggtatcgacaagacccaggcatggggctgaagctgatttattattcagttggtgctggtatcactgataaaggagaagtcccgaatggctacaacgtctccagatcaaccacagaggatttcccgctcaggctggagttggctgctccctcccagacatctgtgtacttctgtgccagcagtcaggtagcgggattcccagatacgcagtattttggcccaggcacccggctgacagtgctcgaggacctgaaaaacgtgttcccacccgaggtcgcctgtctcttatacacatctccgagcccacgagactcctgagcatctcgtatgccgtcttctgcttgaaaaaaaaaa

SEQ ID NO: 113 - DNA, 582 bp, synthetic construct
  source 1..582: mol_type = other DNA
agaggccatcacttgaagatgctgagtcttctgctccttctcctgggactaggcatgggagaggccatcacttgaagatgctgagtcttctgctccttctcctgggactaggctctgtgttcagtgctgtcatctctcaaaagccaagcagggatatctgtcaacgtggaacctccctgacgatccagtgtcaagtcgatagccaagtcaccatgatgttctggtaccgtcagcaacctggacagagcctgacactgatcgcaactgcaaatcagggctctgaggccacatatgagagtggatttgtcattgacaagtttcccatcagccgcccaaacctaacattctcaactctgactgtgagcaacatgagccctgaagacagcagcatatatctctgcagcgttgaggctgcgaacgcctacgagcagtacttcgggccgggcaccaggctcacggtcacagaggacctgaaaaacgtgttcccacccgaggtcgccnntctcttatacacatctccgagcccacgagacggactcctatctcgtatgccgtcttctgcttgaaaaaaaaaaaataaca

SEQ ID NO: 114 - DNA, 581 bp, synthetic construct
  source 1..581: mol_type = other DNA
ggcagtggtcacaactctccccagagaaggtggtgtgaggccatcacggaagatgctgctgcttctgctgcttctggggccaggggggtacaaaagacagttaaggccgtacacgacgctcttccgatctgggaagagaaggtggtgtgaggccatcacggaagatgctgctgcttctgctgcttctggggccaggctccgggcttggtgctgtcgtctctcaacatccgagctgggttatctgtaagagtggaacctctgtgaagatcgagtgccgttccctggactttcaggccatnnnatgctgatggcaacttccaatgagggctccaaggccacatacgagcaaggcgtcgagaaggacaagtttctcatcaaccatgcaagcctgaccttgtccactctgacagtgaccagtgcccatcctgaagacagcagcttctacatctgcagtgctactctcttactagcgggagggccagctaatgagcagttcttcgggccagggacacggctcaccgtgctagaggacctgaaaaacgtgttcccacccgaggtcgcctgtctcttatacacatctc

SEQ ID NO: 115 - DNA, 283 bp, synthetic construct
  source 1..283: mol_type = other DNA
cggcgaccaccgagatctacactctctccgtcgtcggcagcgtcagatgtgtataagagacattacacgacgctcttccgatctgggggaaatgtgaacaacatctgggtcataacgctatgtattccttcacctacacaccctgcagccagaagactcggccctgtatctctgcgccagcagccacaaacactagcgggagcagcgggccggcgaacaccggggagctgttttttggagaaggctctaggctgaccgtactggaggacctgaaaaannnnnt

SEQ ID NO: 116 - DNA, 677 bp, synthetic construct
  source 1..677: mol_type = other DNA
tacacgacgctcttccgatctgggacagtgaccctgatctggtaaagctcccatcctgccctgaccctgccatgggcaccagcctcctctgctggatggccctgtgtctcctgggggcagtacacgacgctcttccgatctgggacagtgaccctgatctggtaaagctcccatcctgccctgaccctgccatgggcaccagcctcctctgctggatggccctgtgtctcctgggggcagatcacgcagatactggagtctcccaggaccccagacacaagatcacaaagaggggacagaatgtaactttcaggtgtgatccaatttctgaacacaaccgcctttattggtaccgacagaccctggggcagggcccagagtttctgacttacttccagaatgaagctcaactagaaaaatcaaggctgctcagtgatcggttctctgcagagaggcctaagggatctttctccaccttggagatccagcgcacagagcagggggactcggccatgtatctctgtgccagcagctcccccggtcagccccagcattttggtgatgggactcgactctccatcctagaggacctgaacaaggtgttcccacccgaggtcgcctgtctcttatacacatctccgagcccacgaggcatctcaggagctcgtatgccgtct

SEQ ID NO: 117 - DNA, 810 bp, synthetic construct
  source 1..810: mol_type = other DNA
tacacgacgctcttcccacccgaggtcgcctgtctcttatacacatctccgcgcccacgaaacggactcctatctcgtatgacgtcttctgcgtgaaaaaaacaagactcaccgagccagaagcactacacagctcgttcccccccggagtcacatctcacttagacacatcatcaagacgaagagactaagaccantacacgacgctcttccgatctgggacaagaaaaaccaccaagcagggccaaggagaccagagcccagcacctcgcccaaaggaccccagtcagaggccccatctcagacccagggccaaggagaccagagcccagcacctcgcccaaaggaccccagtcagaggccccatctcagacccgaggctagcatgggctgcaggctgctctgctgtgcggttctctgtctcctgggagcagttcccatagacactgaagttacccagacaccaaaacacctggtcatgggaatgacaaataagaagtctttgaaatgtgaacaaggcgaccaccgagatctacactatcctcttcgtcggcagcgtcagatgtgtataagagacagtacacgacgctcttccgatctggggagaagactcagccctgtatctctgcgccagcagccaagatccgtgggggataaatgagcagttcttcgggccagggacacggctcaccgtgctagaggacctgaaaaacgtgttcccacccgaggtcgcctgtctcttatacacatctccgagcccacgagactaaggcgaatctcgtatgccgtcttctgcttgaaaaaaaaaaa

SEQ ID NO: 118 - DNA, 676 bp, synthetic construct
  source 1..676: mol_type = other DNA
tacacgacgctcttccgatctgntacacgacgctcttccgatctggggcctcattcctgctgtgatcctgccatggatacctggctcgtattnnngctgtgatcctgccatggatacctggctcgtatgctgggcaatttttagtctcttgaaagcaggactcacagaacctgaagtcacccagactcccagccatcaggtcacacagatgggacaggaagtgatcttgcgctgtgtccccatctctaatcacttatacttctattggtacagacaaatcttggggcagaaagtcgantttctggtttcnttttataataatgaaatctcagagaagtctgaaatattcgatgatcaattctcagttgaaaggcctgatggatcaaatttcactctgaagatccggtccacaaagctggaggactcagccatgtacttctgtgccagcagtcgccgggatagcgggatagggaatgagcagttcttcgggccagggacacggctcaccgtgctagaggacctgaaaaacgtgttcccacccgaggtcgccnntcnnntatacacatctccgagcccacgagacaggcagaaatctcgtatgccgtcttctgcttgaaaaaaaaaaacaacaaaaaaaaatacgcgcagagcaatgtatgtaaaaaagtgactactt

SEQ ID NO: 119 - DNA, 544 bp, synthetic construct
  source 1..544: mol_type = other DNA
agccccaagctaggagatcctgccatgggcttcaggctcctctgctgtgtggccttttgtctcctgggagcaggaagctaggagatcctgccatgggcttcaggctcctctgctgtgtggccttttgtctcctgggagcaggcccagtggattctggagtcacacaaaccccaaagcacctgatcacagcaactggacagcgagtgacgctgagatgctcccctaggtctggagacctctctgtgtactggtaccaacagagcctggaccagggcctccagttcctcattcagtattataatggagaagagagagcaaaaggaaacattcttgaacgattctccgcacaacagttccctgacttgcactctgaactaaacctgagctctctggagctgggggactcagctttgtatttctgtgccagcagcgctcggactagcggggaccccccagatacgcagtattttggcccaggcacccggctgacagtgctcgaggacctgaaaaacgtgttcccacccgaggtcgccnntctcttata

SEQ ID NO: 120 - DNA, 529 bp, synthetic construct
  source 1..529: mol_type = other DNA
tacacgacgctcttccgatctgggctcattcctgctgtgatcctgccatggatacctggctcgtatgctgggcaatttttagtctcttgaaagcaggactcacagaacctgaagtcacccagactcccagccatcaggtcacacagatgggacaggaagtgatcttgcgtcttccgatctggggacagacaaatcttggggcagaaagtcgagtttctggtttcnttttataataatgaaatctcagagaagtctgaaatattcgatgatcaattctcagttgaaaggcctgatggatcaaatttcactctgaagatccggtccacaaagctggaggactcagccatgtacttctgtgccagcagtgcggcaagctataccttcggttcggggaccaggttaaccgttgtagaggacctgaacaaggtgttcccacccgaggtcgcctgtctcttatacacatctccgagcccacgagacggactcctatctcgtatgccgtcttctgcttgaaaaaaaaaaaaaanaa

SEQ ID NO: 121 - DNA, 437 bp, synthetic construct
  source 1..437: mol_type = other DNA
ttacacgacgctcttccgatctggggccttttgtctcctgggagcaggcccagtggattctggagtcacacaaaccccaaagcacctgatcacagcaactggacagcgagtgacgctgagatgctcccctaggtctggagacctctctgtgtactggtaccaacagagcctggaccagggcctccagttcctcattcagtattataatggagaagagagagcaaaaggaaacattcttgaacgattctccgcacaacagttccctgacttgcactctgaactaaacctgagctctctggagctgggggactcagctttgtatttctgtgccagcagcgtagcgagcgtaactagcacagatacgcagtattttggcccaggcacccggctgacagtgctcgaggacctgaaaaacgtgttcccacccgaggtcgccc

SEQ ID NO: 122 - protein, 9 aa, synthetic construct
KVLEYVIKV

SEQ ID NO: 123 - protein, 9 aa, synthetic construct
RLLRLHITM

SEQ ID NO: 124 - protein, 10 aa, synthetic construct
APLPRPGAVL

SEQ ID NO: 125 - protein, 9 aa, synthetic construct
FPSLREAAL

SEQ ID NO: 126 - protein, 9 aa, synthetic construct
FPSSTSSSL

SEQ ID NO: 127 - protein, 9 aa, synthetic construct
VIKKKVVEF

SEQ ID NO: 128 - protein, 9 aa, synthetic construct
RLLELHITM

SEQ ID NO: 129 - protein, 13 aa, synthetic construct
CASSVGAENEQFF

SEQ ID NO: 130 - protein, 15 aa, synthetic construct
CVVTPLDTGRRALTF

SEQ ID NO: 131 - protein, 13 aa, synthetic construct
CASSQGSTDTQYF

SEQ ID NO: 132 - protein, 14 aa, synthetic construct
CAYRILYNTDKLIF

SEQ ID NO: 133 - protein, 18 aa, synthetic construct
CASSPTGLRDGSSYEQYF

SEQ ID NO: 134 - protein, 10 aa, synthetic construct
CLVGDHDMRF

SEQ ID NO: 135 - protein, 14 aa, synthetic construct
CASFSEESRETQYF

SEQ ID NO: 136 - protein, 15 aa, synthetic construct
CAVRPLETSGSRLTF

SEQ ID NO: 137 - protein, 14 aa, synthetic construct
CSVRGLEGQETQYF

SEQ ID NO: 138 - protein, 13 aa, synthetic construct
CDQPQTGANNLFF

SEQ ID NO: 139 - protein, 15 aa, synthetic construct
CASSVGVSGQDTQYF

SEQ ID NO: 140 - protein, 12 aa, synthetic construct
CAVEDERSTLTF

SEQ ID NO: 141 - protein, 15 aa, synthetic construct
CASSNRRDSQETQYF

SEQ ID NO: 142 - protein, 13 aa, synthetic construct
CAVQTTTGNQFYF

SEQ ID NO: 143 - protein, 14 aa, synthetic construct
CASSVAINSYEQYF

SEQ ID NO: 144 - protein, 16 aa, synthetic construct
CVVSSYSGAGSYQLTF

SEQ ID NO: 145 - protein, 19 aa, synthetic construct
CSARDSPGLAGGPRWEQYF

SEQ ID NO: 146 - protein, 11 aa, synthetic construct
CAGSGTYKYIF

SEQ ID NO: 147 - protein, 16 aa, synthetic construct
CASSLSISQGDSPLHF

SEQ ID NO: 148 - protein, 13 aa, synthetic construct
CAALETSYDKVIF

SEQ ID NO: 149 - protein, 16 aa, synthetic construct
CASSSIGTGVYNEQFF

SEQ ID NO: 150 - protein, 14 aa, synthetic construct
CLVATYSSASKIIF

SEQ ID NO: 151 - protein, 18 aa, synthetic construct
CASSGGLAGGLWEETQYF

SEQ ID NO: 152 - protein, 15 aa, synthetic construct
CAVRPLETSGSRLTF

SEQ ID NO: 153 - protein, 15 aa, synthetic construct
CASSLGSSGNNEQFF

SEQ ID NO: 154 - protein, 14 aa, synthetic construct
CAVAFTSGTYKYIF

SEQ ID NO: 155 - protein, 14 aa, synthetic construct
CASSPSRSSYEQYF

SEQ ID NO: 156 - protein, 12 aa, synthetic construct
CATDERYSTLTF

SEQ ID NO: 157 - protein, 16 aa, synthetic construct
CASSQGFGVGGETQYF

SEQ ID NO: 158 - protein, 14 aa, synthetic construct
CVVSSISDGQKLLF

SEQ ID NO: 159 - protein, 14 aa, synthetic construct
CASSQEQGQREQYF

SEQ ID NO: 160 - protein, 16 aa, synthetic construct
CASSPSGRATNEKLFF

SEQ ID NO: 161 - protein, 12 aa, synthetic construct
CAVREDNNDMRF

SEQ ID NO: 162 - protein, 15 aa, synthetic construct
CASTAAGQGPDEQYF

SEQ ID NO: 163 - protein, 15 aa, synthetic construct
CAMSPLSGGYQKVTF

SEQ ID NO: 164 - protein, 15 aa, synthetic construct
CASRPSGPDYNEQFF

SEQ ID NO: 165 - protein, 14 aa, synthetic construct
CASFSEESRETQYF

SEQ ID NO: 166 - protein, 14 aa, synthetic construct
CASSEARLYNEQFF

SEQ ID NO: 167 - protein, 15 aa, synthetic construct
CAVQALKAAGNKLTF

SEQ ID NO: 168 - protein, 15 aa, synthetic construct
CASSYAGSLQETQYF

SEQ ID NO: 169 - protein, 14 aa, synthetic construct
CASSLAQLNTEAFF

SEQ ID NO: 170 - protein, 17 aa, synthetic construct
CAMREPISGAGSYQLTF

SEQ ID NO: 171 - protein, 16 aa, synthetic construct
CASSLDAGTASYEQYF

SEQ ID NO: 172 - protein, 12 aa, synthetic construct
CASSYGGYEQYF

SEQ ID NO: 173 - protein, 14 aa, synthetic construct
CAEAGGTSYGKLTF

SEQ ID NO: 174 - protein, 15 aa, synthetic construct
CAWSVMRANTGELFF

SEQ ID NO: 175 - protein, 14 aa, synthetic construct
CVVRVNSGYSTLTF

SEQ ID NO: 176 - protein, 17 aa, synthetic construct
CAISGEVAGSSYNEQFF

SEQ ID NO: 177 - protein, 13 aa, synthetic construct
CVPQAPGTYKYIF

SEQ ID NO: 178 - protein, 14 aa, synthetic construct
CASSLWVPGNTIYF

SEQ ID NO: 179 - protein, 15 aa, synthetic construct
CASSPLEGPRDEQYF

SEQ ID NO: 180 - protein, 13 aa, synthetic construct
CAAIHGGYQKVTF

SEQ ID NO: 181 - protein, 17 aa, synthetic construct
CASSLGTGGFGTGELFF

SEQ ID NO: 182 - protein, 16 aa, synthetic construct
CAVRHPTASRGSRLTF

SEQ ID NO: 183 - protein, 12 aa, synthetic construct
CASSLRGSEQYF

SEQ ID NO: 184 - protein, 16 aa, synthetic construct
CAYRSLSTGTASKLTF

SEQ ID NO: 185 - protein, 17 aa, synthetic construct
CASSPTGGESLNYGYTF

SEQ ID NO: 186 - protein, 14 aa, synthetic construct
CAVRDAGNNRKLIW

SEQ ID NO: 187 - protein, 17 aa, synthetic construct
CSVESGHHSGRNTEAFF

SEQ ID NO: 188 - protein, 14 aa, synthetic construct
CAVGAGQAGTALIF

SEQ ID NO: 189 - protein, 15 aa, synthetic construct
CASSQVAGFPDTQYF

SEQ ID NO: 190 - protein, 14 aa, synthetic construct
CALRLSNTGNQFYF

SEQ ID NO: 191 - protein, 16 aa, synthetic construct
CASSVASVTSTDTQYF

SEQ ID NO: 192 - protein, 12 aa, synthetic construct
CAAIRPIDKLIF

SEQ ID NO: 193 - protein, 17 aa, synthetic construct
CSATLLLAGGPANEQFF

SEQ ID NO: 194 - protein, 12 aa, synthetic construct
CAASVNNNDMRF

SEQ ID NO: 195 - protein, 18 aa, synthetic construct
CASSQNPVPTGDTGELFF

SEQ ID NO: 196 - protein, 14 aa, synthetic construct
CAVRETDSWGKFQF

SEQ ID NO: 197 - protein, 14 aa, synthetic construct
CASSEAAVSYGYTF

SEQ ID NO: 198 - protein, 13 aa, synthetic construct
CAVWNQAGTALIF

SEQ ID NO: 199 - protein, 15 aa, synthetic construct
CASSPAETSNQPQHF

SEQ ID NO: 200 - protein, 13 aa, synthetic construct
CAIPNQAGTALIF

SEQ ID NO: 201 - protein, 18 aa, synthetic construct
CASSGTSSADRNTGELFF

SEQ ID NO: 202 - protein, 12 aa, synthetic construct
CAVLGNNNDMRF

SEQ ID NO: 203 - protein, 14 aa, synthetic construct
CASSPSPGQPEAFF

SEQ ID NO: 204 - protein, 9 aa, synthetic construct
CAVGSDMRF

SEQ ID NO: 205 - protein, 14 aa, synthetic construct
CASSLSPTNYGYTF

SEQ ID NO: 206 - protein, 15 aa, synthetic construct
CLVGDPKAAGNKLTF

SEQ ID NO: 207 - protein, 12 aa, synthetic construct
CASSSPGQPQHF

SEQ ID NO: 208 - protein, 13 aa, synthetic construct
CSVEAANAYEQYF

SEQ ID NO: 209 - protein, 15 aa, synthetic construct
CASTRTYSSTDTQYF

SEQ ID NO: 210 - protein, 12 aa, synthetic construct
CAVPVYGQNFVF

SEQ ID NO: 211 - protein, 17 aa, synthetic construct
CAATSLDRGSTLGRLYF

SEQ ID NO: 212 - protein, 12 aa, synthetic construct
CASSFGGGEQFF

SEQ ID NO: 213 - protein, 11 aa, synthetic construct
CAARYTYKYIF

SEQ ID NO: 214 - protein, 10 aa, synthetic construct
CASSAASYTF

SEQ ID NO: 215 - protein, 15 aa, synthetic construct
CAVEDPYNQGGKLIF

SEQ ID NO: 216 - protein, 15 aa, synthetic construct
CASSRGAAGNEKLFF

SEQ ID NO: 217 - protein, 11 aa, synthetic construct
CAATNTDKLIF

SEQ ID NO: 218 - protein, 14 aa, synthetic construct
CASSLEGGGYEQFF

SEQ ID NO: 219 - protein, 16 aa, synthetic construct
CASSRRDSGIGNEQFF

SEQ ID NO: 220 - protein, 16 aa, synthetic construct
CAFLQSYGGSQGNLIF

SEQ ID NO: 221 - protein, 15 aa, synthetic construct
CASNRGPSTNEKLFF

SEQ ID NO: 222 - protein, 12 aa, synthetic construct
CAVRDGGGKLIF

SEQ ID NO: 223 - protein, 15 aa, synthetic construct
CASSLRRGDYNEQFF

SEQ ID NO: 224 - protein, 14 aa, synthetic construct
CALGELSNTDKLIF

SEQ ID NO: 225 - protein, 16 aa, synthetic construct
CASRLKREGSYNEQFF

SEQ ID NO: 226 - protein, 12 aa, synthetic construct
CAGEEAGTALIF

SEQ ID NO: 227 - protein, 15 aa, synthetic construct
CASRRTSGSYNEQFF

SEQ ID NO: 228 - protein, 10 aa, synthetic construct
APLPRPGAVL

SEQ ID NO: 229 - protein, 9 aa, synthetic construct
FPSLREAAL

SEQ ID NO: 230 - protein, 9 aa, synthetic construct
FPSSTSSSL

SEQ ID NO: 231 - protein, 9 aa, synthetic construct
ILNPYNLFL

SEQ ID NO: 232 - protein, 9 aa, synthetic construct
KVLEYVIKV

SEQ ID NO: 233 - protein, 9 aa, synthetic construct
RLLELHITM

SEQ ID NO: 234 - protein, 15 aa, synthetic construct
CASTRLAGANNEQFF

SEQ ID NO: 235 - protein, 15 aa, synthetic construct
CASSQLAGATDTQYF

SEQ ID NO: 236 - protein, 16 aa, synthetic construct
CASSVASVTSTDTQYF

SEQ ID NO: 237 - protein, 16 aa, synthetic construct
CASSPTGTSSTDTQYF

SEQ ID NO: 238 - protein, 16 aa, synthetic construct
CASSFWGSSSTDTQYF

SEQ ID NO: 239 - protein, 11 aa, synthetic construct
CASSLASEQYF

SEQ ID NO: 240 - protein, 14 aa, synthetic construct
CASSEAAVSYGYTF

SEQ ID NO: 241 - protein, 10 aa, synthetic construct
CASSAASYTF

SEQ ID NO: 242 - protein, 16 aa, synthetic construct
CASSRRDSGIGNEQFF

SEQ ID NO: 243 - protein, 15 aa, synthetic construct
CASSLRRGDYNEQFF

SEQ ID NO: 244 - protein, 15 aa, synthetic construct
CASRRTSGSYNEQFF

SEQ ID NO: 245 - protein, 12 aa, synthetic construct
CSARDRNYGYTF

SEQ ID NO: 246 - protein, 14 aa, synthetic construct
CASSLSPTNYGYTF

SEQ ID NO: 247 - protein, 14 aa, synthetic construct
CASSPAGTDYGYTF

SEQ ID NO: 248 - protein, 15 aa, synthetic construct
CASSSNLGVEYEQYF

SEQ ID NO: 249 - protein, 15 aa, synthetic construct
CASSQVAGFPDTQYF

SEQ ID NO: 250 - protein, 14 aa, synthetic construct
CSARDGTSGETQYF

SEQ ID NO: 251 - protein, 14 aa, synthetic construct
CASSEDRREDTQYF

SEQ ID NO: 252 - protein, 15 aa, synthetic construct
CASSPIAGVENEQFF

SEQ ID NO: 253 - protein, 14 aa, synthetic construct
CASSPSPGQPEAFF

SEQ ID NO: 254 - protein, 14 aa, synthetic construct
CASSLGQSNQPQHF

SEQ ID NO: 255 - protein, 18 aa, synthetic construct
CASSQNPVPTGDTGELFF

SEQ ID NO: 256 - protein, 14 aa, synthetic construct
CASSLSGGNQPQHF

SEQ ID NO: 257 - protein, 15 aa, synthetic construct
CASSVGRGRDTEAFF

SEQ ID NO: 258 - protein, 12 aa, synthetic construct
CASSLVNTEAFF

SEQ ID NO: 259 - protein, 13 aa, synthetic construct
CASSPDRGTEAFF

SEQ ID NO: 260 - protein, 13 aa, synthetic construct
CASSPYLNTEAFF

SEQ ID NO: 261 - protein, 12 aa, synthetic construct
CASSFGGGEQFF

SEQ ID NO: 262 - protein, 12 aa, synthetic construct
CASSPGGTEAFF

SEQ ID NO: 263 - protein, 14 aa, synthetic construct
CASSLEGGGYEQFF

SEQ ID NO: 264 - protein, 12 aa, synthetic construct
CASSPDSYEQYF

SEQ ID NO: 265 - protein, 11 aa, synthetic construct
CASSLVSSYNI

SEQ ID NO: 266 - protein, 13 aa, synthetic construct
CASSPGTAYEQYF

SEQ ID NO: 267 - protein, 13 aa, synthetic construct
CASSPGLAYEQYF

SEQ ID NO: 268 - protein, 11 aa, synthetic construct
CATSGSSYNEQ

SEQ ID NO: 269 - protein, 15 aa, synthetic construct
CASTRTYSSTDTQYF

SEQ ID NO: 270 - protein, 13 aa, synthetic construct
CSVEAANAYEQYF

SEQ ID NO: 271 - protein, 12 aa, synthetic construct
CASSSPGQPQHF

SEQ ID NO: 272 - protein, 13 aa, synthetic construct
CASSYGQGYEQYF

SEQ ID NO: 273 - protein, 13 aa, synthetic construct
CASSPGTGYEQYF

SEQ ID NO: 274 - protein, 13 aa, synthetic construct
CASSVAGGYEQYF

SEQ ID NO: 275 - protein, 14 aa, synthetic construct
CASSSGTGAYEQYF

SEQ ID NO: 276 - protein, 13 aa, synthetic construct
CASIHLAGETQYF

SEQ ID NO: 277 - protein, 18 aa, synthetic construct
CASSGTSSADRNTGELFF

SEQ ID NO: 278 - protein, 15 aa, synthetic construct
CASSPAETSNQPQHF

SEQ ID NO: 279 - protein, 17 aa, synthetic construct
CSVFAVVASGSRYEQYF

SEQ ID NO: 280 - protein, 17 aa, synthetic construct
CSATLLLAGGPANEQFF

SEQ ID NO: 281 - protein, 9 aa, synthetic construct
FVHLSGREI

SEQ ID NO: 282 - protein, 10 aa, synthetic construct
LVGPGGGVAL

SEQ ID NO: 283 - protein, 8 aa, synthetic construct
WDSLSIYK

SEQ ID NO: 284 - protein, 10 aa, synthetic construct
TDVGLGLLSS

SEQ ID NO: 285 - protein, 9 aa, synthetic construct
EVLINRINE

SEQ ID NO: 286 - protein, 9 aa, synthetic construct
RLLELHITM

SEQ ID NO: 287 - protein, 9 aa, synthetic construct
TPAPRPAVL

SEQ ID NO: 288 - protein, 10 aa, synthetic construct
LVGPGGGVAL

SEQ ID NO: 289 - protein, 9 aa, synthetic construct
KVLEHVVRV

SEQ ID NO: 290 - protein, 10 aa, synthetic construct
ALLAGVSTQA

SEQ ID NO: 291 - protein, 9 aa, synthetic construct
SFSLSKVSF

SEQ ID NO: 292 - protein, 9 aa, synthetic construct
FVHLSGREI

SEQ ID NO: 293 - protein, 8 aa, synthetic construct
WDSLSIYK

SEQ ID NO: 294 - protein, 9 aa, synthetic construct
FLIQHLPLV

SEQ ID NO: 295 - protein, 9 aa, synthetic construct
FQDPYTRSL

SEQ ID NO: 296 - protein, 9 aa, synthetic construct
FVYGEPREL

SEQ ID NO: 297 - protein, 9 aa, synthetic construct
FAFGEPREL

SEQ ID NO: 298 - protein, 8 aa, synthetic construct
MPFVHVVY

SEQ ID NO: 299 - protein, 9 aa, synthetic construct
ALYGGRILK

SEQ ID NO: 300 - protein, 9 aa, synthetic construct
FIDASRLVY

SEQ ID NO: 301 - protein, 8 aa, synthetic construct
FLIPQVLK

SEQ ID NO: 302 - protein, 9 aa, synthetic construct
LAGDVLVSM

SEQ ID NO: 303 - protein, 9 aa, synthetic construct
LPDGSRVEL

SEQ ID NO: 304 - protein, 107 aa, synthetic construct
IEVMYPPPYLDNEKSNGTIIHVKGKHLCPSPLFPGPSKPFWVLVVVGGVLACYSLLVTVAFIIFWVRSKRSRLLHSDYMNMTPRRPGPTRKHYQPYAPPRDFAAYRS

SEQ ID NO: 305 - protein, 9 aa, synthetic construct
IEVMYPPPY

SEQ ID NO: 306 - protein, 4 aa, synthetic construct
KDEL

SEQ ID NO: 307 - protein, 15 aa, synthetic construct
GGGGGGGGGGGGGGG

SEQ ID NO: 308 - protein, 15 aa, synthetic construct
GGGGSGGGGSGGGGS

SEQ ID NO: 309 - protein, 5 aa, synthetic construct
TEFCA

SEQ ID NO: 310 - protein, 5 aa, synthetic construct
APRPG

SEQ ID NO: 311 - protein, 4 aa, synthetic construct
GALA

SEQ ID NO: 312 - protein, 5 aa, synthetic construct
RGDYC

SEQ ID NO: 313 - protein, 5 aa, synthetic construct
ASSHN

SEQ ID NO: 314 - protein, 6 aa, synthetic construct
KCCYSL

SEQ ID NO: 315 - protein, 7 aa, synthetic construct
YEVGHRC

SEQ ID NO: 316 - protein, 8 aa, synthetic construct
GPLGIAGQ

SEQ ID NO: 317 - protein, 20 aa, synthetic construct
METPAQLLFLLLLWLPDTTG

SEQ ID NO: 318 - protein, 18 aa, synthetic construct
MDWTWILFLVAAATRVHS

SEQ ID NO: 319 - protein, 24 aa, synthetic construct
MLGSNSGQRVVFTILLLLVAPAYS

SEQ ID NO: 320 - protein, 17 aa, synthetic construct
MKCLLYLAFLFIGVNCA

SEQ ID NO: 321 - protein, 15 aa, synthetic construct
MWLVSLAIVTACAGA

SEQ ID NO: 322 - protein, 22 aa, synthetic construct
GSGATNFSLLKQAGDVEENPGP

SEQ ID NO: 323 - DNA, 66 bp, synthetic construct
  source 1..66: mol_type = other DNA
ggaagcggagctactaacttcagcctgctgaagcaggctggagacgtggaggagaaccctggacct

SEQ ID NO: 324 - protein, 10 aa, synthetic construct
LYKFNNKEYL

SEQ ID NO: 325 - protein, 9 aa, synthetic construct
AAAAAALLY

SEQ ID NO: 326 - protein, 9 aa, synthetic construct
AAAGYDVEK

SEQ ID NO: 327 - protein, 10 aa, synthetic construct
AAALPAAALW

SEQ ID NO: 328 - protein, 9 aa, synthetic construct
AAANPTLAF

SEQ ID NO: 329 - protein, 9 aa, synthetic construct
AAAPAIMSY

SEQ ID NO: 330 - protein, 9 aa, synthetic construct
AAAPFPLLY

SEQ ID NO: 331 - protein, 10 aa, synthetic construct
AAAVATMIVP

SEQ ID NO: 332 - protein, 8 aa, synthetic construct
AADEPVYI

SEQ ID NO: 333 - protein, 10 aa, synthetic construct
AAEFVPSFLR

SEQ ID NO: 334 - protein, 11 aa, synthetic construct
AAEVVHPGDLK

SEQ ID NO: 335 - protein, 9 aa, synthetic construct
AAFPGASLY

SEQ ID NO: 336 - protein, 9 aa, synthetic construct
AAGGYDVEK

SEQ ID NO: 337 - protein, 9 aa, synthetic construct
AAGQLCLLY

SEQ ID NO: 338 - protein, 8 aa, synthetic construct
AAGYDVEK

SEQ ID NO: 339 - protein, 9 aa, synthetic construct
AANPHSFVF

SEQ ID NO: 340 - protein, 9 aa, synthetic construct
AAPAYSRAL

SEQ ID NO: 341 - protein, 9 aa, synthetic construct
AAPCAVSYL

SEQ ID NO: 342 - protein, 9 aa, synthetic construct
AAPESYEEL

SEQ ID NO: 343 - protein, 10 aa, synthetic construct
AAPGVDLTQL

SEQ ID NO: 344 - protein, 9 aa, synthetic construct
AAPLSGQTF

SEQ ID NO: 345 - protein, 9 aa, synthetic construct
AAPRAPSAL

SEQ ID NO: 346 - protein, 9 aa, synthetic construct
AAPSPFAEL

SEQ ID NO: 347 - protein, 9 aa, synthetic construct
AAPTTFGSL

SEQ ID NO: 348 - protein, 9 aa, synthetic construct
AAPVPTTTL

SEQ ID NO: 349 - protein, 9 aa, synthetic construct
AAPVVPQAL

SEQ ID NO: 350 - protein, 9 aa, synthetic construct
AAPYCVAEL

SEQ ID NO: 351 - protein, 9 aa, synthetic construct
AAPYGIESM

SEQ ID NO: 352 - protein, 11 aa, synthetic construct
AAQGEPQVQFK

SEQ ID NO: 353 - protein, 9 aa, synthetic construct
AARDFVNYL

SEQ ID NO: 354 - protein, 9 aa, synthetic construct
AASDCWLLK

SEQ ID NO: 355 - protein, 9 aa, synthetic construct
AASGLDHLK

SEQ ID NO: 356 - protein, 9 aa, synthetic construct
AASPIITLV

SEQ ID NO: 357 - protein, 9 aa, synthetic construct
AASTAIYVY

SEQ ID NO: 358 - protein, 9 aa, synthetic construct
AAVAAFVLY

SEQ ID NO: 359 - protein, 9 aa, synthetic construct
AAVDGPMDK

SEQ ID NO: 360 - protein, 9 aa, synthetic construct
AAVGFLSSL

SEQ ID NO: 361 - protein, 10 aa, synthetic construct
AAVLQQVLER

SEQ ID NO: 362 - protein, 9 aa, synthetic construct
AAVPEVAVY

SEQ ID NO: 363 - protein, 8 aa, synthetic construct
AAVVLQTK

SEQ ID NO: 364 - protein, 10 aa, synthetic construct
AAWEEVGDTF

SEQ ID NO: 365 - protein, 10 aa, synthetic construct
AAYIGGYVHY

SEQ ID NO: 366 - protein, 9 aa, synthetic construct
AAYYHPSYL

SEQ ID NO: 367 - protein, 9 aa, synthetic construct
ADFSSYLLS

SEQ ID NO: 368 - protein, 9 aa, synthetic construct
ADGYEQAAR

SEQ ID NO: 369 - protein, 11 aa, synthetic construct
ADINGLRQVLD

SEQ ID NO: 370 - protein, 10 aa, synthetic construct
ADLSSQFYLR

SEQ ID NO: 371 - protein, 9 aa, synthetic construct
ADPTGAFGK

SEQ ID NO: 372 - protein, 11 aa, synthetic construct
AEAAFGLGAAA

SEQ ID NO: 373 - protein, 9 aa, synthetic construct
AEAFVSQIA

SEQ ID NO: 374 - protein, 10 aa, synthetic construct
AEAILGQNAA

SEQ ID NO: 375 - protein, 9 aa, synthetic construct
AEAIPEPVV

SEQ ID NO: 376 - protein, 9 aa, synthetic construct
AEAKFFTES

SEQ ID NO: 377 - protein, 10 aa, synthetic construct
AEAQLRFIQA

SEQ ID NO: 378 - protein, 10 aa, synthetic construct
AECGAFRTGP

SEQ ID NO: 379 - protein, 10 aa, synthetic construct
AEDPLGAIHL

SEQ ID NO: 380 - protein, 9 aa, synthetic construct
AEFDTFLAS

SEQ ID NO: 381 - protein, 10 aa, synthetic construct
AEFQDALEKL

SEQ ID NO: 382 - protein, 9 aa, synthetic construct
AEFRFLKSG

SEQ ID NO: 383 - protein, 8 aa, synthetic construct
AEFTVDAK

SEQ ID NO: 384 - protein, 9 aa, synthetic construct
AEGAFPNLA

SEQ ID NO: 385 - protein, 9 aa, synthetic construct
AEGDLIEHF

SEQ ID NO: 386 - protein, 9 aa, synthetic construct
AEHGIFLPP

SEQ ID NO: 387 - protein, 9 aa, synthetic construct
AEIAPFVEI

SEQ ID NO: 388 - protein, 9 aa, synthetic construct
AEIEDPPIP

SEQ ID NO: 389 - protein, 9 aa, synthetic construct
AEIEEALQA

SEQ ID NO: 390 - protein, 9 aa, synthetic construct
AEIHFLENA

SEQ ID NO: 391 - protein, 9 aa, synthetic construct
AEIIQLVNA

SEQ ID NO: 392 - protein, 10 aa, synthetic construct
AEIKVKLIEA

SEQ ID NO: 393 - protein, 9 aa, synthetic construct
AEIPDQLVS

SEQ ID NO: 394 - protein, 9 aa, synthetic construct
AEIPFEKKP

SEQ ID NO: 395 - protein, 9 aa, synthetic construct
AEIQGVIDA

SEQ ID NO: 396 - protein, 9 aa, synthetic construct
AEISSLQSV

SEQ ID NO: 397 - protein, 10 aa, synthetic construct
AEKKFIDIAA

SEQ ID NO: 398 - protein, 9 aa, synthetic construct
AEKVFASEV

SEQ ID NO: 399 - protein, 9 aa, synthetic construct
AEKYEWDVA

SEQ ID NO: 400 - protein, 10 aa, synthetic construct
AELDSVFSSA

SEQ ID NO: 401 - protein, 9 aa, synthetic construct
AELEGLVRA

SEQ ID NO: 402 - protein, 10 aa, synthetic construct
AELEGLVRAA

SEQ ID NO: 403 - protein, 9 aa, synthetic construct
AELQRLVAA

SEQ ID NO: 404 - protein, 9 aa, synthetic construct
AELSQPLTA

SEQ ID NO: 405 - protein, 10 aa, synthetic construct
AELYGPFTSA

SEQ ID NO: 406 - protein, 9 aa, synthetic construct
AENEFSLRP

SEQ ID NO: 407 - protein, 9 aa, synthetic construct
AENEFVTIK

SEQ ID NO: 408 - protein, 10 aa, synthetic construct
AENELGVVVA

SEQ ID NO: 409 - protein, 9 aa, synthetic construct
AENFGLLGA

SEQ ID NO: 410 - protein, 10 aa, synthetic construct
AENPSLENHR

SEQ ID NO: 411 - protein, 9 aa, synthetic construct
AENSLVAYK

SEQ ID NO: 412 - protein, 9 aa, synthetic construct
AENYFQLSV

SEQ ID NO: 413 - protein, 8 aa, synthetic construct
AENYHDIK

SEQ ID NO: 414 - protein, 11 aa, synthetic construct
AEPEADKGTVL

SEQ ID NO: 415 - protein, 10 aa, synthetic construct
AEQEAHYAVR

SEQ ID NO: 416 - protein, 9 aa, synthetic construct
AEQNIIPSA

SEQ ID NO: 417 - protein, 9 aa, synthetic construct
AEQPYFIEA

SEQ ID NO: 418 - protein, 9 aa, synthetic construct
AERMGFTEV

SEQ ID NO: 419 - protein, 10 aa, synthetic construct
AESETFLTST

SEQ ID NO: 420 - protein, 9 aa, synthetic construct
AESPGVPVA

SEQ ID NO: 421 - protein, 11 aa, synthetic construct
AETTSGTFLSA

SEQ ID NO: 422 - protein, 9 aa, synthetic construct
AEVAPMLKA

SEQ ID NO: 423 - protein, 8 aa, synthetic construct
AEVATGEK

SEQ ID NO: 424 - protein, 9 aa, synthetic construct
AEVGRVLQV

SEQ ID NO: 425 - protein, 10 aa, synthetic construct
AEVLEVFHPT

SEQ ID NO: 426 - protein, 9 aa, synthetic construct
AEVVDEIAA

SEQ ID NO: 427 - protein, 8 aa, synthetic construct
AEVYHTLK

SEQ ID NO: 428 - protein, 10 aa, synthetic construct
AEYDRPNLLP

SEQ ID NO: 429 - protein, 9 aa, synthetic construct
AEYGEIKNI

SEQ ID NO: 430 - protein, 9 aa, synthetic construct
AEYGYIRTV

SEQ ID NO: 431 - protein, 10 aa, synthetic construct
AEYPELRGVF

SEQ ID NO: 432 - protein, 9 aa, synthetic construct
AFDITYVRL

SEQ ID NO: 433 - protein, 9 aa, synthetic construct
AFDPTSTLL

SEQ ID NO: 434 - protein, 9 aa, synthetic construct
AFDVHLNAF

SEQ ID NO: 435 - protein, 10 aa, synthetic construct
AFDVVERSFL

SEQ ID NO: 436 - protein, 8 aa, synthetic construct
AFEELVAF

SEQ ID NO: 437 - protein, 10 aa, synthetic construct
AFFGDVVLRF

SEQ ID NO: 438 - protein, 8 aa, synthetic construct
AFIHFDER

SEQ ID NO: 439 - protein, 9 aa, synthetic construct
AFIKRTPVI

SEQ ID NO: 440 - protein, 11 aa, synthetic construct
AFIQAGIFQEF

SEQ ID NO: 441 - protein, 11 aa, synthetic construct
AFSEVVLAEEK

SEQ ID NO: 442 - protein, 8 aa, synthetic construct
AFVHFEDR

SEQ ID NO: 443 - protein, 10 aa, synthetic construct
AGDGLIELRK

SEQ ID NO: 444 - protein, 9 aa, synthetic construct
AGELTPEEE

SEQ ID NO: 445 - protein, 11 aa, synthetic construct
AGELTPEEEAQ

SEQ ID NO: 446 - protein, 8 aa, synthetic construct
AGGYDVEK

SEQ ID NO: 447 - protein, 9 aa, synthetic construct
AGPSGKLSL

SEQ ID NO: 448 - protein, 9 aa, synthetic construct
AGVHFIYTR

SEQ ID NO: 449 - protein, 9 aa, synthetic construct
AGVSFSGHR

SEQ ID NO: 450 - protein, 10 aa, synthetic construct
AGWNAYIDNL

SEQ ID NO: 451 - protein, 8 aa, synthetic construct
AHEFTVYR

SEQ ID NO: 452 - protein, 11 aa, synthetic construct
AHLDATTVLSR

SEQ ID NO: 453 - protein, 11 aa, synthetic construct
AHLPAEFTPAV

SEQ ID NO: 454 - protein, 8 aa, synthetic construct
AHPPLLVL

SEQ ID NO: 455 - protein, 11 aa, synthetic construct
AIDLPGLGHSK

SEQ ID NO: 456 - protein, 9 aa, synthetic construct
AIDQLHLEY

SEQ ID NO: 457 - protein, 9 aa, synthetic construct
AIEDLAGFK

SEQ ID NO: 458 - protein, 9 aa, synthetic construct
AIFQGKLEK

SEQ ID NO: 459 - protein, 9 aa, synthetic construct
AIFQIIQSI

SEQ ID NO: 460 - protein, 10 aa, synthetic construct
AIIDHIFASK

SEQ ID NO: 461 - protein, 9 aa, synthetic construct
AIIENLKYF

SEQ ID NO: 462 - protein, 9 aa, synthetic construct
AIINYVSKV

SEQ ID NO: 463 - protein, 9 aa, synthetic construct
AILDYLITK

SEQ ID NO: 464 - protein, 9 aa, synthetic construct
AIMDIVIKV

SEQ ID NO: 465 - protein, 11 aa, synthetic construct
AINFVTEEDKR

SEQ ID NO: 466 - protein, 9 aa, synthetic construct
AITSGGITY

SEQ ID NO: 467 - protein, 9 aa, synthetic construct
AIVDKIGFY

SEQ ID NO: 468 - protein, 9 aa, synthetic construct
AIVDKVPSV

SEQ ID NO: 469 - protein, 8 aa, synthetic construct
AIVDPHIK

SEQ ID NO: 470 - protein, 10 aa, synthetic construct
AIYATIPVYK

SEQ ID NO: 471 - protein, 9 aa, synthetic construct
AIYGRGIAY

SEQ ID NO: 472 - protein, 11 aa, synthetic construct
ALAASFSEGKE

SEQ ID NO: 473 - protein, 9 aa, synthetic construct
ALAEEVEQV

SEQ ID NO: 474 - protein, 10 aa, synthetic construct
ALAEIAKAEL

SEQ ID NO: 475 - protein, 9 aa, synthetic construct
ALAEYVIYR

SEQ ID NO: 476 - protein, 9 aa, synthetic construct
ALATLIHQV

SEQ ID NO: 477 - protein, 9 aa, synthetic construct
ALATLKVST

SEQ ID NO: 478 - protein, 9 aa, synthetic construct
ALCSRLLEY

SEQ ID NO: 479 - protein, 9 aa, synthetic construct
ALDAAVLAY

SEQ ID NO: 480 - protein, 9 aa, synthetic construct
ALDYNEYFR

SEQ ID NO: 481 - protein, 10 aa, synthetic construct
ALELDPNLYR

SEQ ID NO: 482 - protein, 9 aa, synthetic construct
ALFGALFLA

SEQ ID NO: 483 - protein, 9 aa, synthetic construct
ALFQRPPLI

SEQ ID NO: 484 - protein, 9 aa, synthetic construct
ALLAEHLLK

SEQ ID NO: 485 - protein, 9 aa, synthetic construct
ALLDKLYAL

SEQ ID NO: 486 - protein, 9 aa, synthetic construct
ALLDRIVSV

SEQ ID NO: 487 - protein, 9 aa, synthetic construct
ALLDSAHLL

SEQ ID NO: 488 - protein, 9 aa, synthetic construct
ALLSSLARC

SEQ ID NO: 489 - protein, 9 aa, synthetic construct
ALMAMLVYV

SEQ ID NO: 490 - protein, 10 aa, synthetic construct
ALNPAALTAL

SEQ ID NO: 491 - protein, 9 aa, synthetic construct
ALPDDTEAL

SEQ ID NO: 492 - protein, 9 aa, synthetic construct
ALPEFTSIF

SEQ ID NO: 493 - protein, 9 aa, synthetic construct
ALPESGSSL

SEQ ID NO: 494 - protein, 9 aa, synthetic construct
ALPLGGKAL

SEQ ID NO: 495 - protein, 8 aa, synthetic construct
ALPLVGHR

SEQ ID NO: 496 - protein, 9 aa, synthetic construct
ALPQEFAAL

SEQ ID NO: 497 - protein, 9 aa, synthetic construct
ALQDFLLLK

SEQ ID NO: 498 - protein, 8 aa, synthetic construct
ALRYPMAV

SEQ ID NO: 499 - protein, 9 aa, synthetic construct
ALSADVLGR

SEQ ID NO: 500 - protein, 9 aa, synthetic construct
ALSALTARL

SEQ ID NO: 501 - protein, 9 aa, synthetic construct
ALSGCEISI

SEQ ID NO: 502 - protein, 9 aa, synthetic construct
ALSLVSCKL

SEQ ID NO: 503 - protein, 9 aa, synthetic construct
ALTEYTLYL

SEQ ID NO: 504 - protein, 11 aa, synthetic construct
ALVCDNVEDAR

SEQ ID NO: 505 - protein, 8 aa, synthetic construct
ALVHTDSY

SEQ ID NO: 506 - protein, 9 aa, synthetic construct
ALYDKALGY

SEQ ID NO: 507 - protein, 9 aa, synthetic construct
ALYNQGHIK

SEQ ID NO: 508 - protein, 9 aa, synthetic construct
ALYQPLFDK

SEQ ID NO: 509 - protein, 9 aa, synthetic construct
AMDPVSVSY

SEQ ID NO: 510 - protein, 9 aa, synthetic construct
AMDVVYALK

SEQ ID NO: 511 - protein, 10 aa, synthetic construct
AMFAEFFGGR

SEQ ID NO: 512 - protein, 9 aa, synthetic construct
AMFGKLMTI

SEQ ID NO: 513 - protein, 8 aa, synthetic construct
AMLGVTTV

SEQ ID NO: 514 - protein, 11 aa, synthetic construct
AMSGDPNYLHR

SEQ ID NO: 515 - protein, 9 aa, synthetic construct
AMWEHPITA

SEQ ID NO: 516 - protein, 9 aa, synthetic construct
AMYFIQQKV

SEQ ID NO: 517 - protein, 9 aa, synthetic construct
AMYGGLVLF

SEQ ID NO: 518 - protein, 11 aa, synthetic construct
ANDMIHAENMR

SEQ ID NO: 519 - protein, 11 aa, synthetic construct
ANPQVGVAFPH

SEQ ID NO: 520 - protein, 9 aa, synthetic construct
APAFLYDIY

SEQ ID NO: 521 - protein, 9 aa, synthetic construct
APAIIYDCY

SEQ ID NO: 522 - protein, 9 aa, synthetic construct
APAPLLPVY

SEQ ID NO: 523 - protein, 9 aa, synthetic construct
APAPSTVHF

SEQ ID NO: 524 - protein, 9 aa, synthetic construct
APAPTAVVL

SEQ ID NO: 525 - protein, 9 aa, synthetic construct
APATSILEY

SEQ ID NO: 526 - protein, 9 aa, synthetic construct
APATVGLAF

SEQ ID NO: 527 - protein, 9 aa, synthetic construct
APDELHYTY

SEQ ID NO: 528 - protein, 9 aa, synthetic construct
APDMYVVTY

SEQ ID NO: 529 - protein, 9 aa, synthetic construct
APELLRALL

SEQ ID NO: 530 - protein, 9 aa, synthetic construct
APFEDTLSW

SEQ ID NO: 531 - protein, 9 aa, synthetic construct
APFGMEAEY

SEQ ID NO: 532 - protein, 10 aa, synthetic construct
APFHVVITSY

SEQ ID NO: 533 - protein, 9 aa, synthetic construct
APFLRNVEL

SEQ ID NO: 534 - protein, 9 aa, synthetic construct
APFPELCSY

SEQ ID NO: 535 - protein, 9 aa, synthetic construct
APFRSEVCF

SEQ ID NO: 536 - protein, 9 aa, synthetic construct
APFTAGTSL

SEQ ID NO: 537 - protein, 9 aa, synthetic construct
APFTEGISF

SEQ ID NO: 538 - protein, 11 aa, synthetic construct
APGYSYTAANK

SEQ ID NO: 539 - protein, 10 aa, synthetic construct
APHPFPHPAF

SEQ ID NO: 540 - protein, 10 aa, synthetic construct
APIDEAFESY

SEQ ID NO: 541 - protein, 9 aa, synthetic construct
APIDWIEEY

SEQ ID NO: 542 - protein, 9 aa, synthetic construct
APITVDIEY

SEQ ID NO: 543 - protein, 10 aa, synthetic construct
APIVAHLWEY

SEQ ID NO: 544 - protein, 9 aa, synthetic construct
APLEVAQEH

SEQ ID NO: 545 - protein, 9 aa, synthetic construct
APLKLQMEF

SEQ ID NO: 546 - protein, 9 aa, synthetic construct
APLPPAPAY

SEQ ID NO: 547 - protein, 9 aa, synthetic construct
APLQEKVVF

SEQ ID NO: 548 - protein, 9 aa, synthetic construct
APMPPDHFY

SEQ ID NO: 549 - protein, 9 aa, synthetic construct
APQWPIIAF

SEQ ID NO: 550 - protein, 9 aa, synthetic construct
APRLPITGL

SEQ ID NO: 551 - protein, 10 aa, synthetic construct
APRTVSVQTL

SEQ ID NO: 552 - protein, 9 aa, synthetic construct
APSDTVLMF

SEQ ID NO: 553 - protein, 10 aa, synthetic construct
APSEYRYTLL

SEQ ID NO: 554 - protein, 9 aa, synthetic construct
APSIPTPAY

SEQ ID NO: 555 - protein, 9 aa, synthetic construct
APSTIIFHL

SEQ ID NO: 556 - protein, 9 aa, synthetic construct
APSVVKISY

SEQ ID NO: 557 - protein, 9 aa, synthetic construct
APTDCVSSF

SEQ ID NO: 558 - protein, 9 aa, synthetic construct
APTDVLEAL

SEQ ID NO: 559 - protein, 9 aa, synthetic construct
APTDYCFVL

SEQ ID NO: 560 - protein, 9 aa, synthetic construct
APVAGLPAF

SEQ ID NO: 561 - protein, 9 aa, synthetic construct
APVATVPAM

SEQ ID NO: 562 - protein, 9 aa, synthetic construct
APVDPPVVY

SEQ ID NO: 563 - protein, 9 aa, synthetic construct
APVEVTHNF

SEQ ID NO: 564 - protein, 9 aa, synthetic construct
APVFRDYVF

SEQ ID NO: 565 - protein, 11 aa, synthetic construct
APVGHSGIWSF

SEQ ID NO: 566 - protein, 9 aa, synthetic construct
APVKPGIPY

SEQ ID NO: 567 - protein, 9 aa, synthetic construct
APVPTGEVY

SEQ ID NO: 568 - protein, 9 aa, synthetic construct
APVVFFVDY

SEQ ID NO: 569 - protein, 9 aa, synthetic construct
APWFDPAIF

SEQ ID NO: 570 - protein, 9 aa, synthetic construct
APWKPTWPA

SEQ ID NO: 571 - protein, 10 aa, synthetic construct
APYDDLGKVF

SEQ ID NO: 572 - protein, 9 aa, synthetic construct
APYFGAEDY

SEQ ID NO: 573 - protein, 11 aa, synthetic construct
AQAIEDLAGFK

SEQ ID NO: 574 - protein, 9 aa, synthetic construct
AQATISFPK

SEQ ID NO: 575 - protein, 8 aa, synthetic construct
AQDYGVLK

SEQ ID NO: 576 - protein, 9 aa, synthetic construct
AQEFKTDLR

SEQ ID NO: 577 - protein, 8 aa, synthetic construct
AQELMPVV

SEQ ID NO: 578 - protein, 9 aa, synthetic construct
AQFAHQTYI

SEQ ID NO: 579 - protein, 9 aa, synthetic construct
AQFEHTLLV

SEQ ID NO: 580 - protein, 9 aa, synthetic construct
AQHIVPCTI

SEQ ID NO: 581 - protein, 8 aa, synthetic construct
AQIQVQHV

SEQ ID NO: 582 - protein, 8 aa, synthetic construct
AQIRTIAI

SEQ ID NO: 583 - protein, 8 aa, synthetic construct
AQIYAREI

SEQ ID NO: 584 - protein, 9 aa, synthetic construct
AQLHIKCTI

SEQ ID NO: 585 - protein, 8 aa, synthetic construct
AQNPSLFV

SEQ ID NO: 586 - protein, 9 aa, synthetic construct
AQNPSLFVK

SEQ ID NO: 587 - protein, 8 aa, synthetic construct
AQRLMQLI

SEQ ID NO: 588 - protein, 9 aa, synthetic construct
AQVALVNEV

SEQ ID NO: 589 - protein, 9 aa, synthetic construct
AQVPFEQIL

SEQ ID NO: 590 - protein, 10 aa, synthetic construct
AQYEDIAQKS

SEQ ID NO: 591 - protein, 9 aa, synthetic construct
AQYHLMLHI

SEQ ID NO: 592 - protein, 9 aa, synthetic construct
AQYLINARL

SEQ ID NO: 593 - protein, 9 aa, synthetic construct
AQYLLQNSV

SEQ ID NO: 594 - protein, 8 aa, synthetic construct
AQYNFILV

SEQ ID NO: 595 - protein, 9 aa, synthetic construct
AQYNFILVV

SEQ ID NO: 596 - protein, 8 aa, synthetic construct
AQYPITAV

SEQ ID NO: 597 - protein, 8 aa, synthetic construct
AQYQFTGI

SEQ ID NO: 598 - protein, 9 aa, synthetic construct
ARADFQKVL

SEQ ID NO: 599 - protein, 9 aa, synthetic construct
ARAELEMRL

SEQ ID NO: 600 - protein, 9 aa, synthetic construct
ARFETQVRL

SEQ ID NO: 601 - protein, 11 aa, synthetic construct
ARFNDLRFVGR

SEQ ID NO: 602 - protein, 10 aa, synthetic construct
ARFSPDGQYL

SEQ ID NO: 603 - protein, 11 aa, synthetic construct
ARFSPDGQYLV

SEQ ID NO: 604 - protein, 10 aa, synthetic construct
ARFSPSPLSM

SEQ ID NO: 605 - protein, 9 aa, synthetic construct
ARFYAVQKL

SEQ ID NO: 606 - protein, 9 aa, synthetic construct
ARHPSFFLY

SEQ ID NO: 607 - protein, 9 aa, synthetic construct
ARIFQFQNF

SEQ ID NO: 608 - protein, 10 aa, synthetic construct
ARIKLGDYHF

SEQ ID NO: 609 - protein, 11 aa, synthetic construct
ARIKLGDYHFY

SEQ ID NO: 610 - protein, 9 aa, synthetic construct
ARILDQYLY

SEQ ID NO: 611 - protein, 9 aa, synthetic construct
ARILFPVTF

SEQ ID NO: 612 - protein, 9 aa, synthetic construct
ARLASLMNL

SEQ ID NO: 613 - protein, 9 aa, synthetic construct
ARLDLLYRL

SEQ ID NO: 614 - protein, 9 aa, synthetic construct
ARLFIFETF

SEQ ID NO: 615 - protein, 9 aa, synthetic construct
ARLLMPSQL

SEQ ID NO: 616 - protein, 9 aa, synthetic construct
ARLNWILHF

SEQ ID NO: 617 - protein, 9 aa, synthetic construct
ARLNYLLRV

SEQ ID NO: 618 - protein, 9 aa, synthetic construct
ARLPLRLFL

SEQ ID NO: 619 - protein, 9 aa, synthetic construct
ARLPWAGQL

SEQ ID NO: 620 - protein, 9 aa, synthetic construct
ARLSAKMAL

SEQ ID NO: 621 - protein, 9 aa, synthetic construct
ARLSALYKL

SEQ ID NO: 622 - protein, 10 aa, synthetic construct
ARLSLTYERL

SEQ ID NO: 623 - protein, 10 aa, synthetic construct
ARLTPIPFGL

SEQ ID NO: 624 - protein, 9 aa, synthetic construct
ARLVLLKKL

SEQ ID NO: 625 - protein, 10 aa, synthetic construct
ARMAQPIVAF

SEQ ID NO: 626 - protein, 9 aa, synthetic construct
ARMEMFLFF

SEQ ID NO: 627 - protein, 10 aa, synthetic construct
ARMKIDPEAF

SEQ ID NO: 628 - protein, 9 aa, synthetic construct
ARNIFPSNL

SEQ ID NO: 629 - protein, 8 aa, synthetic construct
ARPPTVIL

SEQ ID NO: 630 - protein, 9 aa, synthetic construct
ARSNLPLAL

SEQ ID NO: 631 - protein, 9 aa, synthetic construct
ARVMSWWDY

SEQ ID NO: 632 - protein, 10 aa, synthetic construct
ARWLPLGLGL

SEQ ID NO: 633 - protein, 11 aa, synthetic construct
ARYDFSHEILR

SEQ ID NO: 634 - protein, 9 aa, synthetic construct
ARYLVNEGF

SEQ ID NO: 635 - protein, 11 aa, synthetic construct
ARYSGSYNDYL

SEQ ID NO: 636 - protein, 9 aa, synthetic construct
ASAEPFPQV

SEQ ID NO: 637 - protein, 9 aa, synthetic construct
ASDMLQLEY

SEQ ID NO: 638 - protein, 9 aa, synthetic construct
ASDSIVLFY

SEQ ID NO: 639 - protein, 9 aa, synthetic construct
ASHTPSLLR

SEQ ID NO: 640 - protein, 11 aa, synthetic construct
ASLLDVFVLTR

SEQ ID NO: 641 - protein, 10 aa, synthetic construct
ASPSLERPEK

SEQ ID NO: 642 - protein, 9 aa, synthetic construct
ASPSSIRSL

SEQ ID NO: 643 - protein, 9 aa, synthetic construct
ASPVRLLSL

SEQ ID NO: 644 - protein, 9 aa, synthetic construct
ASQELWLNH

SEQ ID NO: 645 - protein, 8 aa, synthetic construct
ASSDIQVK

SEQ ID NO: 646 - protein, 10 aa, synthetic construct
ASVFGTMPLK

SEQ ID NO: 647 - protein, 10 aa, synthetic construct
ASYTSGLETL

SEQ ID NO: 648 - protein, 8 aa, synthetic construct
ASYTVSTI

SEQ ID NO: 649 - protein, 9 aa, synthetic construct
ATADVVILY

SEQ ID NO: 650 - protein, 9 aa, synthetic construct
ATANQIILK

SEQ ID NO: 651 - protein, 9 aa, synthetic construct
ATAPPAPAY

SEQ ID NO: 652 - protein, 10 aa, synthetic construct
ATDLDVANFY

SEQ ID NO: 653 - protein, 9 aa, synthetic construct
ATDLTREVY

SEQ ID NO: 654 - protein, 8 aa, synthetic construct
ATELYHQK

SEQ ID NO: 655 - protein, 9 aa, synthetic construct
ATESVSLYY

SEQ ID NO: 656 - protein, 10 aa, synthetic construct
ATESVSLYYY

SEQ ID NO: 657 - protein, 9 aa, synthetic construct
ATETQPIVY

SEQ ID NO: 658 - protein, 9 aa, synthetic construct
ATETVELHK

SEQ ID NO: 659 - protein, 9 aa, synthetic construct
ATFFGEVVK

SEQ ID NO: 660 - protein, 9 aa, synthetic construct
ATFPDTLTY

SEQ ID NO: 661 - protein, 9 aa, synthetic construct
ATFPLSVQK

SEQ ID NO: 662 - protein, 10 aa, synthetic construct
ATGSWDSFLK

SEQ ID NO: 663 - protein, 10 aa, synthetic construct
ATHAAALSVR

SEQ ID NO: 664 - protein, 10 aa, synthetic construct
ATHGAALTVK

SEQ ID NO: 665 - protein, 11 aa, synthetic construct
ATIDPDTISAL

SEQ ID NO: 666 - protein, 9 aa, synthetic construct
ATKARIPFY

SEQ ID NO: 667 - protein, 9 aa, synthetic construct
ATLATHELR

SEQ ID NO: 668 - protein, 11 aa, synthetic construct
ATLLASNEAFK

SEQ ID NO: 669 - protein, 9 aa, synthetic construct
ATLTNILEH

SEQ ID NO: 670 - protein, 9 aa, synthetic construct
ATNFLAHEK

SEQ ID NO: 671 - protein, 9 aa, synthetic construct
ATNRITVTW

SEQ ID NO: 672 - protein, 9 aa, synthetic construct
ATPVSGISL

SEQ ID NO: 673 - protein, 9 aa, synthetic construct
ATSVITIVK

SEQ ID NO: 674 - protein, 9 aa, synthetic construct
ATSYLWFKK

SEQ ID NO: 675 - protein, 10 aa, synthetic construct
ATVAVPLVGK

SEQ ID NO: 676 - protein, 9 aa, synthetic construct
ATVLYIVKK

SEQ ID NO: 677 - protein, 9 aa, synthetic construct
ATYVFLHTV

SEQ ID NO: 678 - protein, 9 aa, synthetic construct
AVAAFVLYK

SEQ ID NO: 679 - protein, 9 aa, synthetic construct
AVCEVALDY

SEQ ID NO: 680 - protein, 9 aa, synthetic construct
AVCEVVTQF

SEQ ID NO: 681 - protein, 9 aa, synthetic construct
AVDLEHHSY

SEQ ID NO: 682 - protein, 10 aa, synthetic construct
AVDPTSGQLY

SEQ ID NO: 683 - protein, 9 aa, synthetic construct
AVFGEATNL

SEQ ID NO: 684 - protein, 10 aa, synthetic construct
AVFGVIGSQK

SEQ ID NO: 685 - protein, 9 aa, synthetic construct
AVFTGALIY

SEQ ID NO: 686 - protein, 9 aa, synthetic construct
AVGVAGSSL

SEQ ID NO: 687 - protein, 9 aa, synthetic construct
AVHDITVAY

SEQ ID NO: 688 - protein, 9 aa, synthetic construct
AVIDSLSAY

SEQ ID NO: 689 - protein, 9 aa, synthetic construct
AVIDVGINR

SEQ ID NO: 690 - protein, 9 aa, synthetic construct
AVIEDTWHY

SEQ ID NO: 691 - protein, 10 aa, synthetic construct
AVIEDTWHYF

SEQ ID NO: 692 - protein, 10 aa, synthetic construct
AVIPCFPYAR

SEQ ID NO: 693 - protein, 9 aa, synthetic construct
AVISGVMSL

SEQ ID NO: 694 - protein, 9 aa, synthetic construct
AVISSVAHY

SEQ ID NO: 695 - protein, 9 aa, synthetic construct
AVLDFVKQK

SEQ ID NO: 696 - protein, 11 aa, synthetic construct
AVLDLGSLLAK

SEQ ID NO: 697 - protein, 9 aa, synthetic construct
AVLHGEAPR

SEQ ID NO: 698 - protein, 9 aa, synthetic construct
AVLSWKLAK

SEQ ID NO: 699 - protein, 9 aa, synthetic construct
AVMNFVVRY

SEQ ID NO: 700 - protein, 10 aa, synthetic construct
AVNPYFDIPK

SEQ ID NO: 701 - protein, 9 aa, synthetic construct
AVNSLISKY

SEQ ID NO: 702 - protein, 9 aa, synthetic construct
AVPITANSL

SEQ ID NO: 703 - protein, 9 aa, synthetic construct
AVPIYSSAL

SEQ ID NO: 704 - protein, 11 aa, synthetic construct
AVQGISGLPLK

SEQ ID NO: 705 - protein, 9 aa, synthetic construct
AVSEAAIIL

SEQ ID NO: 706 - protein, 9 aa, synthetic construct
AVTFPLKSK

SEQ ID NO: 707 - protein, 10 aa, synthetic construct
AVTQHAPYFK

SEQ ID NO: 708 - protein, 11 aa, synthetic construct
AVVITEPEHTK

SEQ ID NO: 709 - protein, 8 aa, synthetic construct
AVVNGEFK

SEQ ID NO: 710 - protein, 10 aa, synthetic construct
AVVYGPHEIR

SEQ ID NO: 711 - protein, 9 aa, synthetic construct
AVYDFFIGR

SEQ ID NO: 712 - protein, 9 aa, synthetic construct
AWDIAIATM

SEQ ID NO: 713 - protein, 9 aa, synthetic construct
AWDKEPVLV

SEQ ID NO: 714 - protein, 9 aa, synthetic construct
AYALLHLLL

SEQ ID NO: 715 - protein, 9 aa, synthetic construct
AYDAIGELF

SEQ ID NO: 716 - protein, 9 aa, synthetic construct
AYGKDFHLI

SEQ ID NO: 717 - protein, 9 aa, synthetic construct
AYLEAIHNF

SEQ ID NO: 718 - protein, 9 aa, synthetic construct
AYLESFYKF

SEQ ID NO: 719 - protein, 9 aa, synthetic construct
AYLLNLNHL

SEQ ID NO: 720 - protein, 9 aa, synthetic construct
AYLPVNESF

SEQ ID NO: 721 - protein, 11 aa, synthetic construct
AYLPVNESFGF

SEQ ID NO: 722 - protein, 9 aa, synthetic construct
AYPEYLITF

SEQ ID NO: 723 - protein, 9 aa, synthetic construct
AYPEYLITY

SEQ ID NO: 724 - protein, 9 aa, synthetic construct
AYPHNLMTF

SEQ ID NO: 725 - protein, 9 aa, synthetic construct
AYQHLFYLL

SEQ ID NO: 726 - protein, 9 aa, synthetic construct
AYVHMVTHF

SEQ ID NO: 727 - protein, 9 aa, synthetic construct
AYVQIKTIW

SEQ ID NO: 728 - protein, 9 aa, synthetic construct
CAVDPTCVL

SEQ ID NO: 729 - protein, 11 aa, synthetic construct
CEYLIGQHVTA

SEQ ID NO: 730 - protein, 9 aa, synthetic construct
CFDLCHQVL

SEQ ID NO: 731 - protein, 10 aa, synthetic construct
CPEQVVGGIY

SEQ ID NO: 732 - protein, 8 aa, synthetic construct
CPGPIITY

SEQ ID NO: 733 - protein, 9 aa, synthetic construct
CPGTVLLVF

SEQ ID NO: 734 - protein, 9 aa, synthetic construct
CPHTIGVEF

SEQ ID NO: 735 - protein, 9 aa, synthetic construct
CPIKEVVLY

SEQ ID NO: 736 - protein, 9 aa, synthetic construct
CPNDGFGVY

SEQ ID NO: 737 - protein, 11 aa, synthetic construct
CPSDKEVEIAY

SEQ ID NO: 738 - protein, 9 aa, synthetic construct
CPVIAIDSF

SEQ ID NO: 739 - protein, 8 aa, synthetic construct
CQIPLFGI

SEQ ID NO: 740 - protein, 8 aa, synthetic construct
CQTIIPKI

SEQ ID NO: 741 - protein, 9 aa, synthetic construct
CRATVCWEL

SEQ ID NO: 742 - protein, 9 aa, synthetic construct
CRFEGQFSI

SEQ ID NO: 743 - protein, 9 aa, synthetic construct
CRLDVNTEL

SEQ ID NO: 744 - protein, 8 aa, synthetic construct
CTDTGVLF

SEQ ID NO: 745 - protein, 9 aa, synthetic construct
CTLPTLPAK

SEQ ID NO: 746 - protein, 9 aa, synthetic construct
CVIGVARSL

SEQ ID NO: 747 - protein, 9 aa, synthetic construct
CVKGDSLSL

SEQ ID NO: 748 - protein, 9 aa, synthetic construct
CYYQPAPYV

SEQ ID NO: 749 - protein, 9 aa, synthetic construct
DAAALISYY

SEQ ID NO: 750 - protein, 9 aa, synthetic construct
DAADIRFVY

SEQ ID NO: 751 - protein, 9 aa, synthetic construct
DAAHEFTVY

SEQ ID NO: 752 - protein, 8 aa, synthetic construct
DADINVTK

SEQ ID NO: 753 - protein, 9 aa, synthetic construct
DAFPLAFDY

SEQ ID NO: 754 - protein, 9 aa, synthetic construct
DAGPPTHAF

SEQ ID NO: 755 - protein, 9 aa, synthetic construct
DAGQFYAKY

SEQ ID NO: 756 - protein, 9 aa, synthetic construct
DAIEALTAY

SEQ ID NO: 757 - protein, 9 aa, synthetic construct
DAIPAVEVF

SEQ ID NO: 758 - protein, 11 aa, synthetic construct
DAIRSLASVSY

SEQ ID NO: 759 - protein, 9 aa, synthetic construct
DAITVVSVM

SEQ ID NO: 760 - protein, 10 aa, synthetic construct
DALGEAINEY

SEQ ID NO: 761 - protein, 9 aa, synthetic construct
DALGHFFQY

SEQ ID NO: 762 - protein, 11 aa, synthetic construct
DALLDNLSRKV

SEQ ID NO: 763 - protein, 9 aa, synthetic construct
DALPEYSTF

SEQ ID NO: 764 - protein, 9 aa, synthetic construct
DALQSLINF

SEQ ID NO: 765 - protein, 10 aa, synthetic construct
DALRFGLCAY

SEQ ID NO: 766 - protein, 8 aa, synthetic construct
DALVITHY

SEQ ID NO: 767 - protein, 9 aa, synthetic construct
DALYGFDSY

SEQ ID NO: 768 - protein, 9 aa, synthetic construct
DAPVSELSL

SEQ ID NO: 769 - protein, 9 aa, synthetic construct
DASALRILF

SEQ ID NO: 770 - protein, 8 aa, synthetic construct
DASISYTY

SEQ ID NO: 771 - protein, 9 aa, synthetic construct
DASRPELLY

SEQ ID NO: 772 - protein, 10 aa, synthetic construct
DATAETDLAK

SEQ ID NO: 773 - protein, 9 aa, synthetic construct
DAVAIVLTY

SEQ ID NO: 774 - protein, 9 aa, synthetic construct
DAVHAILAY

SEQ ID NO: 775 - protein, 9 aa, synthetic construct
DAVKCLSEF

SEQ ID NO: 776 - protein, 8 aa, synthetic construct
DAVTYTEH

SEQ ID NO: 777 - protein, 9 aa, synthetic construct
DAVTYTEHA

SEQ ID NO: 778 - protein, 8 aa, synthetic construct
DAVVSQVL

SEQ ID NO: 779 - protein, 11 aa, synthetic construct
DAWFEEKQQQF

SEQ ID NO: 780 - protein, 9 aa, synthetic construct
DAYALNHTL

SEQ ID NO: 781 - protein, 9 aa, synthetic construct
DAYDFSTDY

SEQ ID NO: 782 - protein, 9 aa, synthetic construct
DAYTHLETF

SEQ ID NO: 783 - protein, 9 aa, synthetic construct
DCFDHFPGY

SEQ ID NO: 784 - protein, 9 aa, synthetic construct
DCPELISEF

SEQ ID NO: 785 - protein, 8 aa, synthetic construct
DDGIDDER

SEQ ID NO: 786 - protein, 8 aa, synthetic construct
DDIVSGHK

SEQ ID NO: 787 - protein, 10 aa, synthetic construct
DEAEAAAAAK

SEQ ID NO: 788 - protein, 9 aa, synthetic construct
DEYQFFTQA

SEQ ID NO: 789 - protein, 8 aa, synthetic construct
DFDLHSEL

SEQ ID NO: 790 - protein, 9 aa, synthetic construct
DFDSVSSIM

SEQ ID NO: 791 - protein, 9 aa, synthetic construct
DFDVAVVTF

SEQ ID NO: 792 - protein, 9 aa, synthetic construct
DFFKERTSF

SEQ ID NO: 793 - protein, 10 aa, synthetic construct
DGFHVINVGR

SEQ ID NO: 794 - protein, 10 aa, synthetic construct
DGFKEQGVTF

SEQ ID NO: 795 - protein, 9 aa, synthetic construct
DGFWDIQTF

SEQ ID NO: 796 - protein, 8 aa, synthetic construct
DGNQDLIR

SEQ ID NO: 797 - protein, 10 aa, synthetic construct
DGWRDMGYTY

SEQ ID NO: 798 - protein, 8 aa, synthetic construct
DGYEQAAR

SEQ ID NO: 799 - protein, 9 aa, synthetic construct
DGYINLVAY

SEQ ID NO: 800 - protein, 9 aa, synthetic construct
DGYVQVEEY

SEQ ID NO: 801 - protein, 9 aa, synthetic construct
DIFAKFSAY

SEQ ID NO: 802 - protein, 9 aa, synthetic construct
DIFPEPVAF

SEQ ID NO: 803 - protein, 9 aa, synthetic construct
DIHDKFAEY

SEQ ID NO: 804 - protein, 9 aa, synthetic construct
DIHSAPSLR

SEQ ID NO: 805 - protein, 10 aa, synthetic construct
DIIEEVTVGY

SEQ ID NO: 806 - protein, 8 aa, synthetic construct
DIISDFVF

SEQ ID NO: 807 - protein, 9 aa, synthetic construct
DIITDVATF

SEQ ID NO: 808 - protein, 9 aa, synthetic construct
DIKIRLENE

SEQ ID NO: 809 - protein, 9 aa, synthetic construct
DIKPYIAEY

SEQ ID NO: 810 - protein, 10 aa, synthetic construct
DILDFAYTSR

SEQ ID NO: 811 - protein, 9 aa, synthetic construct
DINGYILVY

SEQ ID NO: 812 - protein, 10 aa, synthetic construct
DINTDGAVNF

SEQ ID NO: 813 - protein, 9 aa, synthetic construct
DIPERILTY

SEQ ID NO: 814 - protein, 9 aa, synthetic construct
DIPEYVLAY

SEQ ID NO: 815 - protein, 11 aa, synthetic construct
DIPGEAMVKLY

SEQ ID NO: 816 - protein, 10 aa, synthetic construct
DIPSYKNWVE

SEQ ID NO: 817 - protein, 8 aa, synthetic construct
DIRPQLLK

SEQ ID NO: 818 - protein, 11 aa, synthetic construct
DITDGNSEHLK

SEQ ID NO: 819 - protein, 10 aa, synthetic construct
DIWEEKHIAF

SEQ ID NO: 820 - protein, 10 aa, synthetic construct
DIYNFPIHAF

SEQ ID NO: 821 - protein, 9 aa, synthetic construct
DLCDRVSEM

SEQ ID NO: 822 - protein, 8 aa, synthetic construct
DLEVIQHR

SEQ ID NO: 823 - protein, 9 aa, synthetic construct
DLIEHFSQF

SEQ ID NO: 824 - protein, 9 aa, synthetic construct
DLIEKLLNY

SEQ ID NO: 825 - protein, 9 aa, synthetic construct
DLIKDVLRY

SEQ ID NO: 826 - protein, 9 aa, synthetic construct
DLKSALAKF

SEQ ID NO: 827 - protein, 9 aa, synthetic construct
DLMGLIPKY

SEQ ID NO: 828 - protein, 9 aa, synthetic construct
DLPSYVSAF

SEQ ID NO: 829 - protein, 8 aa, synthetic construct
DLVSHHVR

SEQ ID NO: 830 - protein, 9 aa, synthetic construct
DLVTYITRF

SEQ ID NO: 831 - protein, 9 aa, synthetic construct
DMAKVFVEY

SEQ ID NO: 832 - protein, 9 aa, synthetic construct
DMFEDMEKM

SEQ ID NO: 833 - protein, 9 aa, synthetic construct
DMFLEALGY

SEQ ID NO: 834 - protein, 8 aa, synthetic construct
DNAIETEK

SEQ ID NO: 835 - protein, 10 aa, synthetic construct
DNPNQYHYVA

SEQ ID NO: 836 - protein, 9 aa, synthetic construct
DPADIIHDF

SEQ ID NO: 837 - protein, 9 aa, synthetic construct
DPELLQKQP

SEQ ID NO: 838 - protein, 11 aa, synthetic construct
DPFELECPVKY

SEQ ID NO: 839 - protein, 9 aa, synthetic construct
DPFGTSVNY

SEQ ID NO: 840 - protein, 9 aa, synthetic construct
DPFKDIILY

SEQ ID NO: 841 - protein, 11 aa, synthetic construct
DPFLSEKSVSM

SEQ ID NO: 842 - protein, 11 aa, synthetic construct
DPFSFDGPEIM

SEQ ID NO: 843 - protein, 9 aa, synthetic construct
DPFVDRIGY

SEQ ID NO: 844 - protein, 10 aa, synthetic construct
DPFVDRIGYF

SEQ ID NO: 845 - protein, 8 aa, synthetic construct
DPGGSLSK

SEQ ID NO: 846 - protein, 9 aa, synthetic construct
DPHQQIYTF

SEQ ID NO: 847 - protein, 11 aa, synthetic construct
DPIPESVIQNY

SEQ ID NO: 848 - protein, 9 aa, synthetic construct
DPITLFVAL

SEQ ID NO: 849 - protein, 9 aa, synthetic construct
DPLDAAIFY

SEQ ID NO: 850 - protein, 9 aa, synthetic construct
DPLHQEVSF

SEQ ID NO: 851 - protein, 9 aa, synthetic construct
DPLPSAELY

SEQ ID NO: 852 - protein, 9 aa, synthetic construct
DPNEIKVVY

SEQ ID NO: 853 - protein, 9 aa, synthetic construct
DPNFYDETY

SEQ ID NO: 854 - protein, 9 aa, synthetic construct
DPNPNFEKF

SEQ ID NO: 855 - protein, 9 aa, synthetic construct
DPTAVGPVL

SEQ ID NO: 856 - protein, 9 aa, synthetic construct
DPVGDIVSF

SEQ ID NO: 857 - protein, 9 aa, synthetic construct
DPVGYGIPY

SEQ ID NO: 858 - protein, 8 aa, synthetic construct
DPVSLERE

SEQ ID NO: 859 - protein, 11 aa, synthetic construct
DPVTIDCGHVF

SEQ ID NO: 860 - protein, 9 aa, synthetic construct
DPYQGTIVL

SEQ ID NO: 861 - protein, 9 aa, synthetic construct
DQCAVQLFY

SEQ ID NO: 862 - protein, 9 aa, synthetic construct
DQLLSLSMV

SEQ ID NO: 863 - protein, 8 aa, synthetic construct
DSAGHILY

SEQ ID NO: 864 - protein, 10 aa, synthetic construct
DSAGHILYSK

SEQ ID NO: 865 - protein, 9 aa, synthetic construct
DSDFFTSYY

SEQ ID NO: 866 - protein, 9 aa, synthetic construct
DSDMQTLVY

SEQ ID NO: 867 - protein, 9 aa, synthetic construct
DSIERLPVY

SEQ ID NO: 868 - protein, 9 aa, synthetic construct
DSNGTFFVY

SEQ ID NO: 869 - protein, 9 aa, synthetic construct
DSSEEKFLR

SEQ ID NO: 870 - protein, 9 aa, synthetic construct
DSSPVSTPF

SEQ ID NO: 871 - protein, 9 aa, synthetic construct
DTAAIFLIF

SEQ ID NO: 872 - protein, 9 aa, synthetic construct
DTFCTVLEY

SEQ ID NO: 873 - protein, 10 aa, synthetic construct
DTIGEYIALY

SEQ ID NO: 874 - protein, 9 aa, synthetic construct
DTIKGRLNY

SEQ ID NO: 875 - protein, 9 aa, synthetic construct
DTISPYSRM

SEQ ID NO: 876 - protein, 9 aa, synthetic construct
DTIYAMSVF

SEQ ID NO: 877 - protein, 9 aa, synthetic construct
DTLAHVLYY

SEQ ID NO: 878 - protein, 10 aa, synthetic construct
DTNADKQLSF

SEQ ID NO: 879 - protein, 9 aa, synthetic construct
DTVHHMLLF

SEQ ID NO: 880 - protein, 9 aa, synthetic construct
DVAADIAKY

SEQ ID NO: 881 - protein, 9 aa, synthetic construct
DVAALLIKY

SEQ ID NO: 882 - protein, 9 aa, synthetic construct
DVAEEIANY

SEQ ID NO: 883 - protein, 9 aa, synthetic construct
DVAEFSSRY

SEQ ID NO: 884 - protein, 11 aa, synthetic construct
DVAEGDLIEHF

SEQ ID NO: 885 - protein, 9 aa, synthetic construct
DVAGIIADY

SEQ ID NO: 886 - protein, 9 aa, synthetic construct
DVAPTHILY

SEQ ID NO: 887 - protein, 11 aa, synthetic construct
DVASKGLGLVY

SEQ ID NO: 888 - protein, 11 aa, synthetic construct
DVCGQCGLLGY

SEQ ID NO: 889 - protein, 11 aa, synthetic construct
DVCSAQGVRGY

SEQ ID NO: 890 - protein, 9 aa, synthetic construct
DVFCIAQSY

SEQ ID NO: 891 - protein, 10 aa, synthetic construct
DVFHGPYGNF

SEQ ID NO: 892 - protein, 9 aa, synthetic construct
DVFSYEVVM

SEQ ID NO: 893 - protein, 9 aa, synthetic construct
DVHNIYGLY

SEQ ID NO: 894 - protein, 11 aa, synthetic construct
DVHNIYGLYVH

SEQ ID NO: 895 - protein, 11 aa, synthetic construct
DVIAEQSVSGY

SEQ ID NO: 896 - protein, 9 aa, synthetic construct
DVIARIAQH

SEQ ID NO: 897 - protein, 9 aa, synthetic construct
DVICLNSYY

SEQ ID NO: 898 - protein, 9 aa, synthetic construct
DVIDNIMRL

SEQ ID NO: 899 - protein, 9 aa, synthetic construct
DVIERVIQY

SEQ ID NO: 900 - protein, 9 aa, synthetic construct
DVIFSVMCY

SEQ ID NO: 901 - protein, 9 aa, synthetic construct
DVIGCFADF

SEQ ID NO: 902 - protein, 9 aa, synthetic construct
DVIGCFANF

SEQ ID NO: 903 - protein, 9 aa, synthetic construct
DVIGKALQY

SEQ ID NO: 904 - protein, 9 aa, synthetic construct
DVIGTLSGF

SEQ ID NO: 905 - protein, 10 aa, synthetic construct
DVIQHETIGK

SEQ ID NO: 906 - protein, 9 aa, synthetic construct
DVIRLIMQY

SEQ ID NO: 907 - protein, 9 aa, synthetic construct
DVISEISAL

SEQ ID NO: 908 - protein, 9 aa, synthetic construct
DVISSIRNF

SEQ ID NO: 909 - protein, 10 aa, synthetic construct
DVITIIDRSF

SEQ ID NO: 910 - protein, 9 aa, synthetic construct
DVKDLIGFF

SEQ ID NO: 911 - protein, 9 aa, synthetic construct
DVLDAQWLY

SEQ ID NO: 912 - protein, 10 aa, synthetic construct
DVLNFIYSAR

SEQ ID NO: 913 - protein, 10 aa, synthetic construct
DVMTALSQGY

SEQ ID NO: 914 - protein, 9 aa, synthetic construct
DVPDGILDF

SEQ ID NO: 915 - protein, 11 aa, synthetic construct
DVPDGTLVTVM

SEQ ID NO: 916 - protein, 11 aa, synthetic construct
DVPDGTVVTVM

SEQ ID NO: 917 - protein, 9 aa, synthetic construct
DVPDHIIAY

SEQ ID NO: 918 - protein, 8 aa, synthetic construct
DVPFSGLR

SEQ ID NO: 919 - protein, 9 aa, synthetic construct
DVPQWSSQF

SEQ ID NO: 920 - protein, 9 aa, synthetic construct
DVPTFVSFL

SEQ ID NO: 921 - protein, 11 aa, synthetic construct
DVQVELAEKVQ

SEQ ID NO: 922 - protein, 11 aa, synthetic construct
DVSIGGQEVGR

SEQ ID NO: 923 - protein, 9 aa, synthetic construct
DVSPVICSF

SEQ ID NO: 924 - protein, 9 aa, synthetic construct
DVSPVVSTY

SEQ ID NO: 925 - protein, 9 aa, synthetic construct
DVSYVLVIF

SEQ ID NO: 926 - protein, 9 aa, synthetic construct
DVTSILLTY

SEQ ID NO: 927 - protein, 9 aa, synthetic construct
DVVDFFQKY

SEQ ID NO: 928 - protein, 9 aa, synthetic construct
DVVEKLNLF

SEQ ID NO: 929 - protein, 9 aa, synthetic construct
DVVELLIKY

SEQ ID NO: 930 - protein, 10 aa, synthetic construct
DVVGDTSGYY

SEQ ID NO: 931 - protein, 9 aa, synthetic construct
DVVQELLKY

SEQ ID NO: 932 - protein, 10 aa, synthetic construct
DVYAKLLHRY

SEQ ID NO: 933 - protein, 10 aa, synthetic construct
DVYENLYAGR

SEQ ID NO: 934 - protein, 10 aa, synthetic construct
DVYGGTNRYF

SEQ ID NO: 935 - protein, 8 aa, synthetic construct
DWDDDQND

SEQ ID NO: 936 - protein, 9 aa, synthetic construct
DYIDSSWEL

SEQ ID NO: 937 - protein, 9 aa, synthetic construct
DYIDTIWKI

SEQ ID NO: 938 - protein, 9 aa, synthetic construct
EAAAELSAK

SEQ ID NO: 939 - protein, 9 aa, synthetic construct
EAAALLVNY

SEQ ID NO: 940 - protein, 9 aa, synthetic construct
EAADLSLGY

SEQ ID NO: 941 - protein, 9 aa, synthetic construct
EAAPPGELY

SEQ ID NO: 942 - protein, 9 aa, synthetic construct
EAARILDQY

SEQ ID NO: 943 - protein, 10 aa, synthetic construct
EAARLEYDAY

SEQ ID NO: 944 - protein, 10 aa, synthetic construct
EAASLLSELY

SEQ ID NO: 945 - protein, 9 aa, synthetic construct
EAASVPVVY

SEQ ID NO: 946 - protein, 9 aa, synthetic construct
EACGTIAVY

SEQ ID NO: 947 - protein, 9 aa, synthetic construct
EACGVIVEL

SEQ ID NO: 948 - protein, 9 aa, synthetic construct
EACRILLQY

SEQ ID NO: 949 - protein, 9 aa, synthetic construct
EAELEDERK

SEQ ID NO: 950 - protein, 9 aa, synthetic construct
EAEPLEIIY

SEQ ID NO: 951 - protein, 9 aa, synthetic construct
EAFDSTSRF

SEQ ID NO: 952 - protein, 9 aa, synthetic construct
EAFHCISSF

SEQ ID NO: 953 - protein, 10 aa, synthetic construct
EAFKAIGTAY

SEQ ID NO: 954 - protein, 9 aa, synthetic construct
EAFLDVGEY

SEQ ID NO: 955 - protein, 11 aa, synthetic construct
EAFLNAPEANR

SEQ ID NO: 956 - protein, 9 aa, synthetic construct
EAFLNNQEY

SEQ ID NO: 957 - protein, 8 aa, synthetic construct
EAFLVPAY

SEQ ID NO: 958 - protein, 11 aa, synthetic construct
EAFTADGDQVF

SEQ ID NO: 959 - protein, 9 aa, synthetic construct
EAHIDSANK

SEQ ID NO: 960 - protein, 9 aa, synthetic construct
EAIALAEKY

SEQ ID NO: 961 - protein, 10 aa, synthetic construct
EAIDQLHLEY

SEQ ID NO: 962 - protein, 9 aa, synthetic construct
EAIDSPVSF

SEQ ID NO: 963 - protein, 9 aa, synthetic construct
EAIEQILKY

SEQ ID NO: 964 - protein, 10 aa, synthetic construct
EAIETDIAAY

SEQ ID NO: 965 - protein, 10 aa, synthetic construct
EAIETDIVAY

SEQ ID NO: 966 - protein, 9 aa, synthetic construct
EAIGAVIHY

SEQ ID NO: 967 - protein, 9 aa, synthetic construct
EAIRISPTF

SEQ ID NO: 968 - protein, 10 aa, synthetic construct
EAISPDVLRY

SEQ ID NO: 969 - protein, 9 aa, synthetic construct
EAITAIMKY

SEQ ID NO: 970 - protein, 9 aa, synthetic construct
EAITAVGSF

SEQ ID NO: 971 - protein, 8 aa, synthetic construct
EAIVTVIM

SEQ ID NO: 972 - protein, 9 aa, synthetic construct
EALAAVLTY

SEQ ID NO: 973 - protein, 10 aa, synthetic construct
EALAGLLVTY

SEQ ID NO: 974 - protein, 9 aa, synthetic construct
EALAVLTSF

SEQ ID NO: 975 - protein, 9 aa, synthetic construct
EALETSVGY

SEQ ID NO: 976 - protein, 9 aa, synthetic construct
EALQLATSF

SEQ ID NO: 977 - protein, 9 aa, synthetic construct
EALSLAHTY

SEQ ID NO: 978 - protein, 10 aa, synthetic construct
EAMDPVSVSY

SEQ ID NO: 979 - protein, 9 aa, synthetic construct
EAMELIVKL

SEQ ID NO: 980 - protein, 9 aa, synthetic construct
EAMVESIEY

SEQ ID NO: 981 - protein, 9 aa, synthetic construct
EANAISVEL

SEQ ID NO: 982 - protein, 9 aa, synthetic construct
EANQWEVAY

SEQ ID NO: 983 - protein, 9 aa, synthetic construct
EAPFSNLEL

SEQ ID NO: 984 - protein, 9 aa, synthetic construct
EAPSSAISL

SEQ ID NO: 985 - protein, 9 aa, synthetic construct
EAQPIVTKY

SEQ ID NO: 986 - protein, 9 aa, synthetic construct
EASGLSLHY

SEQ ID NO: 987 - protein, 9 aa, synthetic construct
EASGRIYVY

SEQ ID NO: 988 - protein, 9 aa, synthetic construct
EASLPLPGY

SEQ ID NO: 989 - protein, 9 aa, synthetic construct
EASLPSPAM

SEQ ID NO: 990 - protein, 9 aa, synthetic construct
EASPPAPPL

SEQ ID NO: 991 - protein, 9 aa, synthetic construct
EASVLITEY

SEQ ID NO: 992 - protein, 9 aa, synthetic construct
EATDTILCY

SEQ ID NO: 993 - protein, 9 aa, synthetic construct
EATSIYLVF

SEQ ID NO: 994 - protein, 8 aa, synthetic construct
EATTEHIR

SEQ ID NO: 995 - protein, 11 aa, synthetic construct
EAVAAAAASVY

SEQ ID NO: 996 - protein, 10 aa, synthetic construct
EAVCEVALDY

SEQ ID NO: 997 - protein, 9 aa, synthetic construct
EAVDLVSEY

SEQ ID NO: 998 - protein, 9 aa, synthetic construct
EAVDNLSAF

SEQ ID NO: 999 - protein, 9 aa, synthetic construct
EAVDSIFSY

SEQ ID NO: 1000 - protein, 8 aa, synthetic construct
EAVHEDIR

SEQ ID NO: 1001 - protein, 9 aa, synthetic construct
EAVKLCDSY

SEQ ID NO: 1002 - protein, 9 aa, synthetic construct
EAWNGFVAA

SEQ ID NO: 1003 - protein, 10 aa, synthetic construct
EAYGLDKIEF

SEQ ID NO: 1004 - protein, 9 aa, synthetic construct
EAYLIEEMY

SEQ ID NO: 1005 - protein, 9 aa, synthetic construct
EAYVEVAAY

SEQ ID NO: 1006 - protein, 9 aa, synthetic construct
ECIERIPWI

SEQ ID NO: 1007 - protein, 9 aa, synthetic construct
ECPIAQESL

SEQ ID NO: 1008 - protein, 11 aa, synthetic construct
EDEAEAAAAAK

SEQ ID NO: 1009 - protein, 8 aa, synthetic construct
EDGDDDMK

SEQ ID NO: 1010 - protein, 9 aa, synthetic construct
EDLEVIQHR

SEQ ID NO: 1011 - protein, 8 aa, synthetic construct
EDVAFDEK

SEQ ID NO: 1012 - protein, 9 aa, synthetic construct
EEALPVTTA

SEQ ID NO: 1013 - protein, 10 aa, synthetic construct
EEEADMSSPT

SEQ ID NO: 1014 - protein, 9 aa, synthetic construct
EEFPNLAVA

SEQ ID NO: 1015 - protein, 9 aa, synthetic construct
EEIARLLMA

SEQ ID NO: 1016 - protein, 9 aa, synthetic construct
EEIEGLISA

SEQ ID NO: 1017 - protein, 8 aa, synthetic construct
EEIGGGQK

SEQ ID NO: 1018 - protein, 11 aa, synthetic construct
EELDPDFIMAK

SEQ ID NO: 1019 - protein, 9 aa, synthetic construct
EFDAVLADF

SEQ ID NO: 1020 - protein, 8 aa, synthetic construct
EFDTKTSA

SEQ ID NO: 1021 - protein, 11 aa, synthetic construct
EFLTPVEEAPK

SEQ ID NO: 1022 - protein, 11 aa, synthetic construct
EFLVAVASNGL

SEQ ID NO: 1023 - protein, 8 aa, synthetic construct
EFNGKLLA

SEQ ID NO: 1024 - protein, 8 aa, synthetic construct
EFSSHITR

SEQ ID NO: 1025 - protein, 8 aa, synthetic construct
EGDLIEHF

SEQ ID NO: 1026 - protein, 10 aa, synthetic construct
EGENLFIWEE

SEQ ID NO: 1027 - protein, 8 aa, synthetic construct
EGFSIHTR

SEQ ID NO: 1028 - protein, 8 aa, synthetic construct
EGSLIVEK

SEQ ID NO: 1029 - protein, 9 aa, synthetic construct
EHEYIQNFK

SEQ ID NO: 1030 - protein, 8 aa, synthetic construct
EHLEERLL

SEQ ID NO: 1031 - protein, 9 aa, synthetic construct
EIADVSVQM

SEQ ID NO: 1032 - protein, 9 aa, synthetic construct
EIAEAYLGY

SEQ ID NO: 1033 - protein, 9 aa, synthetic construct
EIAGHIMEF

SEQ ID NO: 1034 - protein, 9 aa, synthetic construct
EIAKATFMY

SEQ ID NO: 1035 - protein, 9 aa, synthetic construct
EIAQEFKTD

SEQ ID NO: 1036 - protein, 10 aa, synthetic construct
EIFGENIPVH

SEQ ID NO: 1037 - protein, 10 aa, synthetic construct
EIFNPDIGMF

SEQ ID NO: 1038 - protein, 10 aa, synthetic construct
EIFPGNGHCY

SEQ ID NO: 1039 - protein, 10 aa, synthetic construct
EIFPLETPAF

SEQ ID NO: 1040 - protein, 10 aa, synthetic construct
EIIDNSQGFY

SEQ ID NO: 1041 - protein, 9 aa, synthetic construct
EIIEDLAFY

SEQ ID NO: 1042 - protein, 10 aa, synthetic construct
EIIEHGIELF

SEQ ID NO: 1043 - protein, 10 aa, synthetic construct
EIIETGLAAF

SEQ ID NO: 1044 - protein, 9 aa, synthetic construct
EIIKEISIM

SEQ ID NO: 1045 - protein, 9 aa, synthetic construct
EIIKIIGKY

SEQ ID NO: 1046 - protein, 9 aa, synthetic construct
EIIKLIADY

SEQ ID NO: 1047 - protein, 9 aa, synthetic construct
EIISTVTSF

SEQ ID NO: 1048 - protein, 9 aa, synthetic construct
EIKDKLLNY

SEQ ID NO: 1049 - protein, 9 aa, synthetic construct
EIKEVILEF

SEQ ID NO: 1050 - protein, 11 aa, synthetic construct
EILNNCCVMEY

SEQ ID NO: 1051 - protein, 9 aa, synthetic construct
EIMTRIQTY

SEQ ID NO: 1052 - protein, 9 aa, synthetic construct
EIPATVTAF

SEQ ID NO: 1053 - protein, 8 aa, synthetic construct
EIPEQLVP

SEQ ID NO: 1054 - protein, 9 aa, synthetic construct
EIRELLTEF

SEQ ID NO: 1055 - protein, 10 aa, synthetic construct
EISQFVSEGY

SEQ ID NO: 1056 - protein, 9 aa, synthetic construct
EITEVALEY

SEQ ID NO: 1057 - protein, 9 aa, synthetic construct
EIVEKILSV

SEQ ID NO: 1058 - protein, 9 aa, synthetic construct
EIVNISSGY

SEQ ID NO: 1059 - protein, 10 aa, synthetic construct
EIVPFRVAAY

SEQ ID NO: 1060 - protein, 10 aa, synthetic construct
EIYGGSDSRF

SEQ ID NO: 1061 - protein, 10 aa, synthetic construct
EKALNSIIDV

SEQ ID NO: 1062 - protein, 8 aa, synthetic construct
EKILFTEA

SEQ ID NO: 1063 - protein, 9 aa, synthetic construct
ELADVGSEY

SEQ ID NO: 1064 - protein, 9 aa, synthetic construct
ELANEIRAL

SEQ ID NO: 1065 - protein, 9 aa, synthetic construct
ELAPSIFFY

SEQ ID NO: 1066 - protein, 9 aa, synthetic construct
ELCDIILRV

SEQ ID NO: 1067 - protein, 9 aa, synthetic construct
ELDNTYIVY

SEQ ID NO: 1068 - protein, 8 aa, synthetic construct
ELDPEHQR

SEQ ID NO: 1069 - protein, 10 aa, synthetic construct
ELIDQDARDL

SEQ ID NO: 1070 - protein, 9 aa, synthetic construct
ELIEALLKY

SEQ ID NO: 1071 - protein, 9 aa, synthetic construct
ELIEKMIAM

SEQ ID NO: 1072 - protein, 9 aa, synthetic construct
ELIERIPEL

SEQ ID NO: 1073 - protein, 9 aa, synthetic construct
ELIESMPLL

SEQ ID NO: 1074 - protein, 9 aa, synthetic construct
ELIETIQEM

SEQ ID NO: 1075 - protein, 9 aa, synthetic construct
ELIRKIEAY

SEQ ID NO: 1076 - protein, 9 aa, synthetic construct
ELISTTANY

SEQ ID NO: 1077 - protein, 9 aa, synthetic construct
ELITKFLQY

SEQ ID NO: 1078 - protein, 9 aa, synthetic construct
ELKEVIERF

SEQ ID NO: 1079 - protein, 9 aa, synthetic construct
ELKHFIAEY

SEQ ID NO: 1080 - protein, 9 aa, synthetic construct
ELKQKILLF

SEQ ID NO: 1081 - protein, 9 aa, synthetic construct
ELPDYLIKY

SEQ ID NO: 1082 - protein, 8 aa, synthetic construct
ELRLKAVA

SEQ ID NO: 1083 - protein, 9 aa, synthetic construct
ELSDIHTRF

SEQ ID NO: 1084 - protein, 8 aa, synthetic construct
ELSDLARL

SEQ ID NO: 1085 - protein, 9 aa, synthetic construct
ELSPVSFQY

SEQ ID NO: 1086 - protein, 11 aa, synthetic construct
ELVDAFVEHRY

SEQ ID NO: 1087 - protein, 9 aa, synthetic construct
ELYPYIVEF

SEQ ID NO: 1088 - protein, 9 aa, synthetic construct
EMKEYITKF

SEQ ID NO: 1089 - protein, 11 aa, synthetic construct
EMTSLSEYVSR

SEQ ID NO: 1090 - protein, 10 aa, synthetic construct
ENLEPEHEYK

SEQ ID NO: 1091 - protein, 9 aa, synthetic construct
EPAAFQALY

SEQ ID NO: 1092 - protein, 9 aa, synthetic construct
EPAESLSEF

SEQ ID NO: 1093 - protein, 9 aa, synthetic construct
EPAVVSLEY

SEQ ID NO: 1094 - protein, 9 aa, synthetic construct
EPCHFPFLF

SEQ ID NO: 1095 - protein, 9 aa, synthetic construct
EPESLGVVY

SEQ ID NO: 1096 - protein, 9 aa, synthetic construct
EPFPDGAEL

SEQ ID NO: 1097 - protein, 8 aa, synthetic construct
EPGSPAEK

SEQ ID NO: 1098 - protein, 9 aa, synthetic construct
EPIFPALIY

SEQ ID NO: 1099 - protein, 9 aa, synthetic construct
EPLLVVAAF

SEQ ID NO: 1100 - protein, 9 aa, synthetic construct
EPLNSDVQY

SEQ ID NO: 1101 - protein, 11 aa, synthetic construct
EPMPALEGHIF

SEQ ID NO: 1102 - protein, 9 aa, synthetic construct
EPNNFISTY

SEQ ID NO: 1103 - protein, 9 aa, synthetic construct
EPNSTKFVF

SEQ ID NO: 1104 - protein, 10 aa, synthetic construct
EPPLFHPNVY

SEQ ID NO: 1105 - protein, 11 aa, synthetic construct
EPPVIQNPEYK

SEQ ID NO: 1106 - protein, 9 aa, synthetic construct
EPQHVLLRY

SEQ ID NO: 1107 - protein, 9 aa, synthetic construct
EPQSLCYVF

SEQ ID NO: 1108 - protein, 9 aa, synthetic construct
EPSAVALEL

SEQ ID NO: 1109 - protein, 9 aa, synthetic construct
EPSFITESY

SEQ ID NO: 1110 - protein, 9 aa, synthetic construct
EPVDISTAM

SEQ ID NO: 1111 - protein, 11 aa, synthetic construct
EPVRTLAEHSY

SEQ ID NO: 1112 - protein, 9 aa, synthetic construct
EPWPGQYQF

SEQ ID NO: 1113 - protein, 9 aa, synthetic construct
EPYFDEYEM

SEQ ID NO: 1114 - protein, 9 aa, synthetic construct
EPYPEVDIF

SEQ ID NO: 1115 - protein, 8 aa, synthetic construct
EQFLLPVI

SEQ ID NO: 1116 - protein, 8 aa, synthetic construct
EQGPLRLI

SEQ ID NO: 1117 - protein, 11 aa, synthetic construct
EQHDNIVTHYK

SEQ ID NO: 1118 - protein, 9 aa, synthetic construct
EQIDLLQQY

SEQ ID NO: 1119 - protein, 8 aa, synthetic construct
EQLTVAEI

SEQ ID NO: 1120 - protein, 11 aa, synthetic construct
EQMHQLVAAYK

SEQ ID NO: 1121 - protein, 9 aa, synthetic construct
EQRLFTEKV

SEQ ID NO: 1122 - protein, 9 aa, synthetic construct
EQYKFPVVI

SEQ ID NO: 1123 - protein, 8 aa, synthetic construct
EQYTFIYI

SEQ ID NO: 1124 - protein, 11 aa, synthetic construct
ERIKLEGIITR

SEQ ID NO: 1125 - protein, 9 aa, synthetic construct
ERINLILQM

SEQ ID NO: 1126 - protein, 9 aa, synthetic construct
ERLQYVFGY

SEQ ID NO: 1127 - protein, 9 aa, synthetic construct
ESADLIQHY

SEQ ID NO: 1128 - protein, 10 aa, synthetic construct
ESFGGGFADF

SEQ ID NO: 1129 - protein, 9 aa, synthetic construct
ESSAVISAF

SEQ ID NO: 1130 - protein, 9 aa, synthetic construct
ESSPILTSF

SEQ ID NO: 1131 - protein, 9 aa, synthetic construct
ESSYIATQY

SEQ ID NO: 1132 - protein, 9 aa, synthetic construct
ETADITHAL

SEQ ID NO: 1133 - protein, 11 aa, synthetic construct
ETADTLMGLRY

SEQ ID NO: 1134 - protein, 9 aa, synthetic construct
ETAFGYKGL

SEQ ID NO: 1135 - protein, 9 aa, synthetic construct
ETALGIGGF

SEQ ID NO: 1136 - protein, 10 aa, synthetic construct
ETANITPSVY

SEQ ID NO: 1137 - protein, 10 aa, synthetic construct
ETAPLTKNYY

SEQ ID NO: 1138 - protein, 9 aa, synthetic construct
ETAQAIASY

SEQ ID NO: 1139 - protein, 9 aa, synthetic construct
ETAVAILRF

SEQ ID NO: 1140 - protein, 9 aa, synthetic construct
ETAVLLGSY

SEQ ID NO: 1141 - protein, 9 aa, synthetic construct
ETCHISNLF

SEQ ID NO: 1142 - protein, 11 aa, synthetic construct
ETCSGCNIARY

SEQ ID NO: 1143 - protein, 10 aa, synthetic construct
ETDKNGFLQY

SEQ ID NO: 1144 - protein, 11 aa, synthetic construct
ETDLLDIRSEY

SEQ ID NO: 1145 - protein, 9 aa, synthetic construct
ETDNNIVVY

SEQ ID NO: 1146 - protein, 11 aa, synthetic construct
ETEGRYCVQLS

SEQ ID NO: 1147 - protein, 10 aa, synthetic construct
ETFDAGLQAF

SEQ ID NO: 1148 - protein, 10 aa, synthetic construct
ETFDFQAMGR

SEQ ID NO: 1149 - protein, 9 aa, synthetic construct
ETFDGLYYY

SEQ ID NO: 1150 - protein, 10 aa, synthetic construct
ETFDGVIYGF

SEQ ID NO: 1151 - protein, 10 aa, synthetic construct
ETFGFEIQSY

SEQ ID NO: 1152 - protein, 11 aa, synthetic construct
ETFGGFDSHQM

SEQ ID NO: 1153 - protein, 11 aa, synthetic construct
ETFKEQGNAYY

SEQ ID NO: 1154 - protein, 11 aa, synthetic construct
ETFPANIQVVY

SEQ ID NO: 1155 - protein, 9 aa, synthetic construct
ETFPGVTAL

SEQ ID NO: 1156 - protein, 10 aa, synthetic construct
ETFPGVTALF

SEQ ID NO: 1157 - protein, 9 aa, synthetic construct
ETFYSTERY

SEQ ID NO: 1158 - protein, 11 aa, synthetic construct
ETHLNELNIMD

SEQ ID NO: 1159 - protein, 9 aa, synthetic construct
ETIAKLVKY

SEQ ID NO: 1160 - protein, 9 aa, synthetic construct
ETIANVAKF

SEQ ID NO: 1161 - protein, 9 aa, synthetic construct
ETIDLGALY

SEQ ID NO: 1162 - protein, 9 aa, synthetic construct
ETIDRFNNY

SEQ ID NO: 1163 - protein, 11 aa, synthetic construct
ETIDVHSGYDI

SEQ ID NO: 1164 - protein, 9 aa, synthetic construct
ETIERLQQL

SEQ ID NO: 1165 - protein, 9 aa, synthetic construct
ETIETINQL

SEQ ID NO: 1166 - protein, 9 aa, synthetic construct
ETIGIIFKH

SEQ ID NO: 1167 - protein, 10 aa, synthetic construct
ETIHIRGGVF

SEQ ID NO: 1168 - protein, 10 aa, synthetic construct
ETIKDGVSRF

SEQ ID NO: 1169 - protein, 9 aa, synthetic construct
ETINRIKLY

SEQ ID NO: 1170 - protein, 9 aa, synthetic construct
ETIRNILLH

SEQ ID NO: 1171 - protein, 10 aa, synthetic construct
ETISPSGQGV

SEQ ID NO: 1172 - protein, 9 aa, synthetic construct
ETITVSPEY

SEQ ID NO: 1173 - protein, 9 aa, synthetic construct
ETIYGRMWY

SEQ ID NO: 1174 - protein, 9 aa, synthetic construct
ETIYNPDYY

SEQ ID NO: 1175 - protein, 10 aa, synthetic construct
ETMGINGSAY

SEQ ID NO: 1176 - protein, 10 aa, synthetic construct
ETMKILGSLY

SEQ ID NO: 1177 - protein, 9 aa, synthetic construct
ETMNIFLEK

SEQ ID NO: 1178 - protein, 9 aa, synthetic construct
ETNDIFLWY

SEQ ID NO: 1179 - protein, 9 aa, synthetic construct
ETPDYLLKY

SEQ ID NO: 1180 - protein, 9 aa, synthetic construct
ETPRSVPGF

SEQ ID NO: 1181 - protein, 9 aa, synthetic construct
ETSDIQIFY

SEQ ID NO: 1182 - protein, 9 aa, synthetic construct
ETTAVALAY

SEQ ID NO: 1183 - protein, 11 aa, synthetic construct
ETVATGPYRAF

SEQ ID NO: 1184 - protein, 9 aa, synthetic construct
ETVGKFIQY

SEQ ID NO: 1185 - protein, 9 aa, synthetic construct
ETVLKTTGY

SEQ ID NO: 1186 - protein, 9 aa, synthetic construct
ETVPAVPTV

SEQ ID NO: 1187 - protein, 9 aa, synthetic construct
ETVPKVSIV

SEQ ID NO: 1188 - protein, 9 aa, synthetic construct
ETVPLIPEV

SEQ ID NO: 1189 - protein, 9 aa, synthetic construct
ETVQTTLKF

SEQ ID NO: 1190 - protein, 9 aa, synthetic construct
ETVRLVSGM

SEQ ID NO: 1191 - protein, 10 aa, synthetic construct
ETVRTLNNLY

SEQ ID NO: 1192 - protein, 9 aa, synthetic construct
ETVSGLKGY

SEQ ID NO: 1193 - protein, 9 aa, synthetic construct
ETVTELTEF

SEQ ID NO: 1194 - protein, 9 aa, synthetic construct
EVAAAIAGY

SEQ ID NO: 1195 - protein, 11 aa, synthetic construct
EVAAAIAGYVF

SEQ ID NO: 1196 - protein, 9 aa, synthetic construct
EVAATEIKM

SEQ ID NO: 1197 - protein, 10 aa, synthetic construct
EVADELVSEF

SEQ ID NO: 1198 - protein, 9 aa, synthetic construct
EVADVGIEV

SEQ ID NO: 1199 - protein, 9 aa, synthetic construct
EVAELLVKH

SEQ ID NO: 1200 - protein, 9 aa, synthetic construct
EVAELLVRH

SEQ ID NO: 1201 - protein, 10 aa, synthetic construct
EVANFAAYAF

SEQ ID NO: 1202 - protein, 9 aa, synthetic construct
EVAPALSVF

SEQ ID NO: 1203 - protein, 9 aa, synthetic construct
EVAPDFFEY

SEQ ID NO: 1204 - protein, 10 aa, synthetic construct
EVAPDFFEYF

SEQ ID NO: 1205 - protein, 10 aa, synthetic construct
EVAPENFFSL

SEQ ID NO: 1206 - protein, 10 aa, synthetic construct
EVAPGALLGL

SEQ ID NO: 1207 - protein, 10 aa, synthetic construct
EVASAVCLRL

SEQ ID NO: 1208 - protein, 10 aa, synthetic construct
EVASGMILVM

SEQ ID NO: 1209 - protein, 9 aa, synthetic construct
EVASVYQSY

SEQ ID NO: 1210 - protein, 9 aa, synthetic construct
EVATFFAKM

SEQ ID NO: 1211 - protein, 9 aa, synthetic construct
EVAYTVFQY

SEQ ID NO: 1212 - protein, 9 aa, synthetic construct
EVCDDFLVY

SEQ ID NO: 1213 - protein, 11 aa, synthetic construct
EVCGNALMKQY

SEQ ID NO: 1214 - protein, 10 aa, synthetic construct
EVCPLSESRF

SEQ ID NO: 1215 - protein, 9 aa, synthetic construct
EVCRAVLSF

SEQ ID NO: 1216 - protein, 10 aa, synthetic construct
EVCRECGFCY

SEQ ID NO: 1217 - protein, 10 aa, synthetic construct
EVFANRFTQM

SEQ ID NO: 1218 - protein, 10 aa, synthetic construct
EVFDKDLSKL

SEQ ID NO: 1219 - protein, 9 aa, synthetic construct
EVFDKTYQF

SEQ ID NO: 1220 - protein, 10 aa, synthetic construct
EVFDKTYQFL

SEQ ID NO: 1221 - protein, 10 aa, synthetic construct
EVFEPPLTGY

SEQ ID NO: 1222 - protein, 9 aa, synthetic construct
EVFESVSAY

SEQ ID NO: 1223 - protein, 10 aa, synthetic construct
EVFETIIHSY

SEQ ID NO: 1224 - protein, 9 aa, synthetic construct
EVFGFISLL

SEQ ID NO: 1225 - protein, 9 aa, synthetic construct
EVFGYLAKY

SEQ ID NO: 1226 - protein, 9 aa, synthetic construct
EVFMKTLNY

SEQ ID NO: 1227 - protein, 10 aa, synthetic construct
EVFPEHLARF

SEQ ID NO: 1228 - protein, 10 aa, synthetic construct
EVFQTKIQEF

SEQ ID NO: 1229 - protein, 10 aa, synthetic construct
EVFSFKMVSY

SEQ ID NO: 1230 - protein, 9 aa, synthetic construct
EVFTEILNY

SEQ ID NO: 1231 - protein, 10 aa, synthetic construct
EVFTGGISSY

SEQ ID NO: 1232 - protein, 9 aa, synthetic construct
EVGDFIQRY

SEQ ID NO: 1233 - protein, 9 aa, synthetic construct
EVHDYIRAY

SEQ ID NO: 1234 - protein, 9 aa, synthetic construct
EVIDSILLV

SEQ ID NO: 1235 - protein, 9 aa, synthetic construct
EVIDVFEIM

SEQ ID NO: 1236 - protein, 11 aa, synthetic construct
EVIDVFEIMKA

SEQ ID NO: 1237 - protein, 9 aa, synthetic construct
EVIDVVRTM

SEQ ID NO: 1238 - protein, 10 aa, synthetic construct
EVIESTNLKY

SEQ ID NO: 1239 - protein, 11 aa, synthetic construct
EVIESTNLKYF

SEQ ID NO: 1240 - protein, 9 aa, synthetic construct
EVIEYSAVF

SEQ ID NO: 1241 - protein, 11 aa, synthetic construct
EVIGHYPGSSF

SEQ ID NO: 1242 - protein, 9 aa, synthetic construct
EVIGKITAL

SEQ ID NO: 1243 - protein, 9 aa, synthetic construct
EVIGLLGGR

SEQ ID NO: 1244 - protein, 10 aa, synthetic construct
EVIGLLGGRY

SEQ ID NO: 1245 - protein, 10 aa, synthetic construct
EVIGQVLSTL

SEQ ID NO: 1246 - protein, 9 aa, synthetic construct
EVIKDANLY

SEQ ID NO: 1247 - protein, 9 aa, synthetic construct
EVIKESGPP

SEQ ID NO: 1248 - protein, 9 aa, synthetic construct
EVIKEVQEF

SEQ ID NO: 1249 - protein, 9 aa, synthetic construct
EVINRIQKL

SEQ ID NO: 1250 - protein, 10 aa, synthetic construct
EVINRSMDTY

SEQ ID NO: 1251 - protein, 9 aa, synthetic construct
EVINTVAQV

SEQ ID NO: 1252 - protein, 10 aa, synthetic construct
EVIPENTVIY

SEQ ID NO: 1253 - protein, 9 aa, synthetic construct
EVIPLVQTF

SEQ ID NO: 1254 - protein, 9 aa, synthetic construct
EVIPPMKEF

SEQ ID NO: 1255 - protein, 9 aa, synthetic construct
EVIPQVSLV

SEQ ID NO: 1256 - protein, 9 aa, synthetic construct
EVIPTHTVY

SEQ ID NO: 1257 - protein, 9 aa, synthetic construct
EVIPYTPAM

SEQ ID NO: 1258 - protein, 9 aa, synthetic construct
EVIQEIKSF

SEQ ID NO: 1259 - protein, 9 aa, synthetic construct
EVIRLIANF

SEQ ID NO: 1260 - protein, 9 aa, synthetic construct
EVISILKQE

SEQ ID NO: 1261 - protein, 10 aa, synthetic construct
EVISQHLVSY

SEQ ID NO: 1262 - protein, 9 aa, synthetic construct
EVISSVSEL

SEQ ID NO: 1263 - protein, 9 aa, synthetic construct
EVIVGVNKY

SEQ ID NO: 1264 - protein, 11 aa, synthetic construct
EVIWSHAIQKY

SEQ ID NO: 1265 - protein, 8 aa, synthetic construct
EVKEALNQ

SEQ ID NO: 1266 - protein, 11 aa, synthetic construct
EVKEDIGVGSY

SEQ ID NO: 1267 - protein, 9 aa, synthetic construct
EVKPILNYY

SEQ ID NO: 1268 - protein, 9 aa, synthetic construct
EVKPRILLM

SEQ ID NO: 1269 - protein, 9 aa, synthetic construct
EVKPVLPEL

SEQ ID NO: 1270 - protein, 9 aa, synthetic construct
EVKSRTTLF

SEQ ID NO: 1271 - protein, 9 aa, synthetic construct
EVLDFITHL

SEQ ID NO: 1272 - protein, 10 aa, synthetic construct
EVLDFITHLY

SEQ ID NO: 1273 - protein, 9 aa, synthetic construct
EVLDGYLGF

SEQ ID NO: 1274 - protein, 10 aa, synthetic construct
EVLDSHIHAY

SEQ ID NO: 1275 - protein, 9 aa, synthetic construct
EVLGLILRY

SEQ ID NO: 1276 - protein, 9 aa, synthetic construct
EVLKAVTAL

SEQ ID NO: 1277 - protein, 10 aa, synthetic construct
EVLPAALAVY

SEQ ID NO: 1278 - protein, 9 aa, synthetic construct
EVLPINTQY

SEQ ID NO: 1279 - protein, 9 aa, synthetic construct
EVLQYLSRF

SEQ ID NO: 1280 - protein, 9 aa, synthetic construct
EVLSFISTM

SEQ ID NO: 1281 - protein, 9 aa, synthetic construct
EVLWPLPAY

SEQ ID NO: 1282 - protein, 9 aa, synthetic construct
EVMDVFLRF

SEQ ID NO: 1283 - protein, 9 aa, synthetic construct
EVMEIMSRF

SEQ ID NO: 1284 - protein, 10 aa, synthetic construct
EVNADRITWL

SEQ ID NO: 1285 - protein, 9 aa, synthetic construct
EVNAVVLLY

SEQ ID NO: 1286 - protein, 9 aa, synthetic construct
EVNGLISMY

SEQ ID NO: 1287 - protein, 9 aa, synthetic construct
EVNKFQMAY

SEQ ID NO: 1288 - protein, 10 aa, synthetic construct
EVNSSLLEYY

SEQ ID NO: 1289 - protein, 11 aa, synthetic construct
EVPDGTVVTVM

SEQ ID NO: 1290 - protein, 11 aa, synthetic construct
EVPDPNVVPHY

SEQ ID NO: 1291 - protein, 8 aa, synthetic construct
EVPETPKA

SEQ ID NO: 1292 - protein, 9 aa, synthetic construct
EVPGHQSVF

SEQ ID NO: 1293 - protein, 9 aa, synthetic construct
EVPGPAAAL

SEQ ID NO: 1294 - protein, 9 aa, synthetic construct
EVPHEVGDF

SEQ ID NO: 1295 - protein, 11 aa, synthetic construct
EVPPPTVPMDY

SEQ ID NO: 1296 - protein, 9 aa, synthetic construct
EVPQRLFPL

SEQ ID NO: 1297 - protein, 9 aa, synthetic construct
EVQEIVSVY

SEQ ID NO: 1298 - protein, 9 aa, synthetic construct
EVSAYLTRF

SEQ ID NO: 1299 - protein, 9 aa, synthetic construct
EVSDRISSL

SEQ ID NO: 1300 - protein, 9 aa, synthetic construct
EVSELLGTY

SEQ ID NO: 1301 - protein, 9 aa, synthetic construct
EVSGIKAAY

SEQ ID NO: 1302 - protein, 9 aa, synthetic construct
EVSGIKALY

SEQ ID NO: 1303 - protein, 9 aa, synthetic construct
EVSLDLILV

SEQ ID NO: 1304 - protein, 9 aa, synthetic construct
EVSPKLPEY

SEQ ID NO: 1305 - protein, 9 aa, synthetic construct
EVSPNLVRY

SEQ ID NO: 1306 - protein, 9 aa, synthetic construct
EVSSISSKF

SEQ ID NO: 1307 - protein, 9 aa, synthetic construct
EVTDFAGQY

SEQ ID NO: 1308 - protein, 9 aa, synthetic construct
EVTEFISKL

SEQ ID NO: 1309 - protein, 9 aa, synthetic construct
EVTEIISQF

SEQ ID NO: 1310 - protein, 9 aa, synthetic construct
EVTELLVKH

SEQ ID NO: 1311 - protein, 9 aa, synthetic construct
EVTTNIPKM

SEQ ID NO: 1312 - protein, 9 aa, synthetic construct
EVTYDVAQY

SEQ ID NO: 1313 - protein, 9 aa, synthetic construct
EVVAFIQHF

SEQ ID NO: 1314 - protein, 9 aa, synthetic construct
EVVDFLYQY

SEQ ID NO: 1315 - protein, 9 aa, synthetic construct
EVVDFSSHY

SEQ ID NO: 1316 - protein, 9 aa, synthetic construct
EVVDVTWRY

SEQ ID NO: 1317 - protein, 9 aa, synthetic construct
EVVELASAF

SEQ ID NO: 1318 - protein, 9 aa, synthetic construct
EVVELLIKY

SEQ ID NO: 1319 - protein, 9 aa, synthetic construct
EVVENLLNY

SEQ ID NO: 1320 - protein, 10 aa, synthetic construct
EVVEQGLLKM

SEQ ID NO: 1321 - protein, 9 aa, synthetic construct
EVVERILFI

SEQ ID NO: 1322 - protein, 9 aa, synthetic construct
EVVERLLSV

SEQ ID NO: 1323 - protein, 9 aa, synthetic construct
EVVETTQVY

SEQ ID NO: 1324 - protein, 10 aa, synthetic construct
EVVGGSSDSY

SEQ ID NO: 1325 - protein, 9 aa, synthetic construct
EVVGIIESR

SEQ ID NO: 1326 - protein, 9 aa, synthetic construct
EVVGLIFRL

SEQ ID NO: 1327 - protein, 11 aa, synthetic construct
EVVGNMAVSRY

SEQ ID NO: 1328 - protein, 9 aa, synthetic construct
EVVGVYGSF

SEQ ID NO: 1329 - protein, 11 aa, synthetic construct
EVVQKLKFGVY

SEQ ID NO: 1330 - protein, 9 aa, synthetic construct
EVVQRISNV

SEQ ID NO: 1331 - protein, 9 aa, synthetic construct
EVVRKILLL

SEQ ID NO: 1332 - protein, 9 aa, synthetic construct
EVVRVCPGF

SEQ ID NO: 1333 - protein, 9 aa, synthetic construct
EVVSVLHVF

SEQ ID NO: 1334 - protein, 9 aa, synthetic construct
EVVTTIPTI

SEQ ID NO: 1335 - protein, 9 aa, synthetic construct
EVVTVFQYY

SEQ ID NO: 1336 - protein, 9 aa, synthetic construct
EVWYDIQSY

SEQ ID NO: 1337 - protein, 10 aa, synthetic construct
EVYCDSMEQF

SEQ ID NO: 1338 - protein, 9 aa, synthetic construct
EVYEGALLY

SEQ ID NO: 1339 - protein, 9 aa, synthetic construct
EVYNLTQEF

SEQ ID NO: 1340 - protein, 10 aa, synthetic construct
EVYPGAKLFY

SEQ ID NO: 1341 - protein, 9 aa, synthetic construct
EVYPGQQYL

SEQ ID NO: 1342 - protein, 11 aa, synthetic construct
EVYSADREDLY

SEQ ID NO: 1343 - protein, 9 aa, synthetic construct
EVYSRPSSL

SEQ ID NO: 1344 - protein, 9 aa, synthetic construct
EWDQVTVYL

SEQ ID NO: 1345 - protein, 9 aa, synthetic construct
EYIDDLFKL

SEQ ID NO: 1346 - protein, 9 aa, synthetic construct
EYIQFVPLL

SEQ ID NO: 1347 - protein, 9 aa, synthetic construct
EYLIVFPKL

SEQ ID NO: 1348 - protein, 9 aa, synthetic construct
EYMEHVYLI

SEQ ID NO: 1349 - protein, 9 aa, synthetic construct
EYQKVWNLF

SEQ ID NO: 1350 - protein, 8 aa, synthetic construct
EYSEEELK

SEQ ID NO: 1351 - protein, 9 aa, synthetic construct
FAAKFIVPY

SEQ ID NO: 1352 - protein, 9 aa, synthetic construct
FAANVYEAF

SEQ ID NO: 1353 - protein, 10 aa, synthetic construct
FAAQTVGNTY

SEQ ID NO: 1354 - protein, 9 aa, synthetic construct
FACDTKLEW

SEQ ID NO: 1355 - protein, 9 aa, synthetic construct
FACPIVDSI

SEQ ID NO: 1356 - protein, 9 aa, synthetic construct
FACPSKATF

SEQ ID NO: 1357 - protein, 9 aa, synthetic construct
FADGFVLVY

SEQ ID NO: 1358 - protein, 9 aa, synthetic construct
FADQEVRSL

SEQ ID NO: 1359 - protein, 9 aa, synthetic construct
FAEPSSVSF

SEQ ID NO: 1360 - protein, 9 aa, synthetic construct
FAFDEIVAL

SEQ ID NO: 1361 - protein, 9 aa, synthetic construct
FAFDPSVNY

SEQ ID NO: 1362 - protein, 9 aa, synthetic construct
FAFEEAIGY

SEQ ID NO: 1363 - protein, 9 aa, synthetic construct
FAFFDPVMY

SEQ ID NO: 1364 - protein, 9 aa, synthetic construct
FAFGEPREL

SEQ ID NO: 1365 - protein, 8 aa, synthetic construct
FAGEHTIR

SEQ ID NO: 1366 - protein, 9 aa, synthetic construct
FAHDDSVMY

SEQ ID NO: 1367 - protein, 9 aa, synthetic construct
FAIDPHLLL

SEQ ID NO: 1368 - protein, 11 aa, synthetic construct
FAIDPHLLLSV

SEQ ID NO: 1369 - protein, 11 aa, synthetic construct
FAKSVSFSDVF

SEQ ID NO: 1370 - protein, 8 aa, synthetic construct
FALVSQAY

SEQ ID NO: 1371 - protein, 9 aa, synthetic construct
FANVEEHSF

SEQ ID NO: 1372 - protein, 9 aa, synthetic construct
FAPGDLPEL

SEQ ID NO: 1373 - protein, 9 aa, synthetic construct
FASADGLTY

SEQ ID NO: 1374 - protein, 9 aa, synthetic construct
FASEVSNVL

SEQ ID NO: 1375 - protein, 9 aa, synthetic construct
FASFSDYYY

SEQ ID NO: 1376 - protein, 9 aa, synthetic construct
FASHVSPEV

SEQ ID NO: 1377 - protein, 9 aa, synthetic construct
FATDSGLEF

SEQ ID NO: 1378 - protein, 10 aa, synthetic construct
FAVDLEHHSY

SEQ ID NO: 1379 - protein, 9 aa, synthetic construct
FAVTDELVF

SEQ ID NO: 1380 - protein, 9 aa, synthetic construct
FAYDGKDYL

SEQ ID NO: 1381 - protein, 11 aa, synthetic construct
FAYDGKDYLTL

SEQ ID NO: 1382 - protein, 9 aa, synthetic construct
FAYEGASFY

SEQ ID NO: 1383 - protein, 10 aa, synthetic construct
FAYSDSRVGF

SEQ ID NO: 1384 - protein, 9 aa, synthetic construct
FCIEVGKNL

SEQ ID NO: 1385 - protein, 9 aa, synthetic construct
FCPEYSISL

SEQ ID NO: 1386 - protein, 9 aa, synthetic construct
FCVDSITAL

SEQ ID NO: 1387 - protein, 11 aa, synthetic construct
FDEEMEQMDGR

SEQ ID NO: 1388 - protein, 8 aa, synthetic construct
FDGRVVAK

SEQ ID NO: 1389 - protein, 8 aa, synthetic construct
FDHAVSKF

SEQ ID NO: 1390 - protein, 8 aa, synthetic construct
FDVAPSRL

SEQ ID NO: 1391 - protein, 11 aa, synthetic construct
FDVHDVTLHAD

SEQ ID NO: 1392 - protein, 11 aa, synthetic construct
FEAPEALFQPH

SEQ ID NO: 1393 - protein, 8 aa, synthetic construct
FEDPVISK

SEQ ID NO: 1394 - protein, 9 aa, synthetic construct
FEFDTKTSA

SEQ ID NO: 1395 - protein, 9 aa, synthetic construct
FEILPGLSV

SEQ ID NO: 1396 - protein, 9 aa, synthetic construct
FEIRGTLLP

SEQ ID NO: 1397 - protein, 9 aa, synthetic construct
FEITDFTTA

SEQ ID NO: 1398 - protein, 9 aa, synthetic construct
FEKEWIECA

SEQ ID NO: 1399 - protein, 9 aa, synthetic construct
FEKVFSIGP

SEQ ID NO: 1400 - protein, 9 aa, synthetic construct
FELDTSVTP

SEQ ID NO: 1401 - protein, 8 aa, synthetic construct
FERELGVK

SEQ ID NO: 1402 - protein, 9 aa, synthetic construct
FESSPDPEL

SEQ ID NO: 1403 - protein, 9 aa, synthetic construct
FETEFNTQP

SEQ ID NO: 1404 - protein, 9 aa, synthetic construct
FEVPSTPEA

SEQ ID NO: 1405 - protein, 9 aa, synthetic construct
FEYFGPDFK

SEQ ID NO: 1406 - protein, 9 aa, synthetic construct
FEYILSHVA

SEQ ID NO: 1407 - protein, 8 aa, synthetic construct
FEYQVRSI

SEQ ID NO: 1408 - protein, 9 aa, synthetic construct
FEYSIRTTP

SEQ ID NO: 1409 - protein, 9 aa, synthetic construct
FFDAAKLMF

SEQ ID NO: 1410 - protein, 9 aa, synthetic construct
FFDNISSEL

SEQ ID NO: 1411 - protein, 9 aa, synthetic construct
FFDPAIRVL

SEQ ID NO: 1412 - protein, 9 aa, synthetic construct
FFDPNTEEN

SEQ ID NO: 1413 - protein, 10 aa, synthetic construct
FFDPNTHENL

SEQ ID NO: 1414 - protein, 8 aa, synthetic construct
FFDSACTM

SEQ ID NO: 1415 - protein, 8 aa, synthetic construct
FFDSTAIL

SEQ ID NO: 1416 - protein, 9 aa, synthetic construct
FFEVSPVSF

SEQ ID NO: 1417 - protein, 9 aa, synthetic construct
FFIPDIEYL

SEQ ID NO: 1418 - protein, 11 aa, synthetic construct
FGAHTYELLAK

SEQ ID NO: 1419 - protein, 8 aa, synthetic construct
FGDACVYL

SEQ ID NO: 1420 - protein, 8 aa, synthetic construct
FGDVELSR

SEQ ID NO: 1421 - protein, 8 aa, synthetic construct
FGFEIQSY

SEQ ID NO: 1422 - protein, 11 aa, synthetic construct
FGFSEPLAAPR

SEQ ID NO: 1423 - protein, 8 aa, synthetic construct
FGIPCELR

SEQ ID NO: 1424 - protein, 9 aa, synthetic construct
FGLPRLPEE

SEQ ID NO: 1425 - protein, 10 aa, synthetic construct
FGPDSKSSAL

SEQ ID NO: 1426 - protein, 8 aa, synthetic construct
FGPGIEGK

SEQ ID NO: 1427 - protein, 9 aa, synthetic construct
FGPPPCPEL

SEQ ID NO: 1428 - protein, 9 aa, synthetic construct
FGPSSLNSL

SEQ ID NO: 1429 - protein, 8 aa, synthetic construct
FGQLGREL

SEQ ID NO: 1430 - protein, 10 aa, synthetic construct
FGTELLHYQL

SEQ ID NO: 1431 - protein, 9 aa, synthetic construct
FGWEEDEDF

SEQ ID NO: 1432 - protein, 9 aa, synthetic construct
FGWPSFITY

SEQ ID NO: 1433 - protein, 9 aa, synthetic construct
FHMVVEVPR

SEQ ID NO: 1434 - protein, 9 aa, synthetic construct
FIAPTGHSL

SEQ ID NO: 1435 - protein, 11 aa, synthetic construct
FIFREGDGVYY

SEQ ID NO: 1436 - protein, 9 aa, synthetic construct
FIISRTQAL

SEQ ID NO: 1437 - protein, 9 aa, synthetic construct
FINPKPITY

SEQ ID NO: 1438 - protein, 9 aa, synthetic construct
FIPFSVSSV

SEQ ID NO: 1439 - protein, 9 aa, synthetic construct
FIQAKVNAL

SEQ ID NO: 1440 - protein, 9 aa, synthetic construct
FIQEIEHAL

SEQ ID NO: 1441 - protein, 9 aa, synthetic construct
FIVEETLPL

SEQ ID NO: 1442 - protein, 9 aa, synthetic construct
FIYHLPQEF

SEQ ID NO: 1443 - protein, 9 aa, synthetic construct
FKNPIIEKY

SEQ ID NO: 1444 - protein, 9 aa, synthetic construct
FLADIVQKL

SEQ ID NO: 1445 - protein, 11 aa, synthetic construct
FLAFLSREMAA

SEQ ID NO: 1446 - protein, 9 aa, synthetic construct
FLAPLVTEY

SEQ ID NO: 1447 - protein, 9 aa, synthetic construct
FLCESVFSY

SEQ ID NO: 1448 - protein, 9 aa, synthetic construct
FLDALIVSM

SEQ ID NO: 1449 - protein, 10 aa, synthetic construct
FLDDGHTFNY

SEQ ID NO: 1450 - protein, 10 aa, synthetic construct
FLDFIGHILT

SEQ ID NO: 1451 - protein, 9 aa, synthetic construct
FLDGNEMTL

SEQ ID NO: 1452 - protein, 9 aa, synthetic construct
FLDSTSPLL

SEQ ID NO: 1453 - protein, 9 aa, synthetic construct
FLDTSNQHL

SEQ ID NO: 1454 - protein, 9 aa, synthetic construct
FLEQVHQLY

SEQ ID NO: 1455 - protein, 7 aa, synthetic construct
FLEVNRL

SEQ ID NO: 1456 - protein, 10 aa, synthetic construct
FLFDEEMEQM

SEQ ID NO: 1457 - protein, 9 aa, synthetic construct
FLFEPVVKA

SEQ ID NO: 1458 - protein, 9 aa, synthetic construct
FLFNKVVNL

SEQ ID NO: 1459 - protein, 9 aa, synthetic construct
FLKEIVETF

SEQ ID NO: 1460 - protein, 9 aa, synthetic construct
FLLEKGYEV

SEQ ID NO: 1461 - protein, 9 aa, synthetic construct
FLLEKPFSV

SEQ ID NO: 1462 - protein, 9 aa, synthetic construct
FLLHIQQQV

SEQ ID NO: 1463 - protein, 9 aa, synthetic construct
FLLKSCPLL

SEQ ID NO: 1464 - protein, 9 aa, synthetic construct
FLLPIAVVS

SEQ ID NO: 1465 - protein, 9 aa, synthetic construct
FLMDFIHQV

SEQ ID NO: 1466 - protein, 9 aa, synthetic construct
FLPDGCDHL

SEQ ID NO: 1467 - protein, 9 aa, synthetic construct
FLPEGVNKL

SEQ ID NO: 1468 - protein, 9 aa, synthetic construct
FLPGISTAL

SEQ ID NO: 1469 - protein, 10 aa, synthetic construct
FLPLLPNLLQ

SEQ ID NO: 1470 - protein, 9 aa, synthetic construct
FLPNAPKAL

SEQ ID NO: 1471 - protein, 10 aa, synthetic construct
FLPSELRDEH

SEQ ID NO: 1472 - protein, 9 aa, synthetic construct
FLPSPLHAL

SEQ ID NO: 1473 - protein, 10 aa, synthetic construct
FLPTRALAAL

SEQ ID NO: 1474 - protein, 10 aa, synthetic construct
FLQEGDLISA

SEQ ID NO: 1475 - protein, 9 aa, synthetic construct
FLQPELVKL

SEQ ID NO: 1476 - protein, 9 aa, synthetic construct
FLSTLEHHL

SEQ ID NO: 1477 - protein, 9 aa, synthetic construct
FLTKQEILL

SEQ ID NO: 1478 - protein, 9 aa, synthetic construct
FLVEHNLVL

SEQ ID NO: 1479 - protein, 9 aa, synthetic construct
FLVTVIHTL

SEQ ID NO: 1480 - protein, 10 aa, synthetic construct
FLWQEGHSAF

SEQ ID NO: 1481 - protein, 10 aa, synthetic construct
FLWSASNEII

SEQ ID NO: 1482 - protein, 10 aa, synthetic construct
FLYTGEGDTV

SEQ ID NO: 1483 - protein, 9 aa, synthetic construct
FMSEISDEF

SEQ ID NO: 1484 - protein, 9 aa, synthetic construct
FMYSGVLRV

SEQ ID NO: 1485 - protein, 9 aa, synthetic construct
FNALFVRPH

SEQ ID NO: 1486 - protein, 8 aa, synthetic construct
FPAEFAMY

SEQ ID NO: 1487 - protein, 9 aa, synthetic construct
FPAELGIVF

SEQ ID NO: 1488 - protein, 8 aa, synthetic construct
FPAEPLEL

SEQ ID NO: 1489 - protein, 9 aa, synthetic construct
FPAGSTLIF

SEQ ID NO: 1490 - protein, 10 aa, synthetic construct
FPAGSTLIFY

SEQ ID NO: 1491 - protein, 9 aa, synthetic construct
FPAKVTAHW

SEQ ID NO: 1492 - protein, 10 aa, synthetic construct
FPALFGDVKF

SEQ ID NO: 1493 - protein, 9 aa, synthetic construct
FPANIQVVY

SEQ ID NO: 1494 - protein, 9 aa, synthetic construct
FPANNIVKF

SEQ ID NO: 1495 - protein, 10 aa, synthetic construct
FPAPAKAVVY

SEQ ID NO: 1496 - protein, 10 aa, synthetic construct
FPAPGKPGNY

SEQ ID NO: 1497 - protein, 9 aa, synthetic construct
FPATLMVML

SEQ ID NO: 1498 - protein, 9 aa, synthetic construct
FPCFDEPAF

SEQ ID NO: 1499 - protein, 10 aa, synthetic construct
FPDEPYKDGY

SEQ ID NO: 1500 - protein, 8 aa, synthetic construct
FPDIPIGY

SEQ ID NO: 1501 - protein, 9 aa, synthetic construct
FPDKPITQY

SEQ ID NO: 1502 - protein, 10 aa, synthetic construct
FPDPEKPCKM

SEQ ID NO: 1503 - protein, 10 aa, synthetic construct
FPEAYKPTVY

SEQ ID NO: 1504 - protein, 10 aa, synthetic construct
FPEEFDKTSF

SEQ ID NO: 1505 - protein, 10 aa, synthetic construct
FPEEVIATIF

SEQ ID NO: 1506 - protein, 9 aa, synthetic construct
FPEPNPRVI

SEQ ID NO: 1507 - protein, 11 aa, synthetic construct
FPEPNPRVIEL

SEQ ID NO: 1508 - protein, 9 aa, synthetic construct
FPESPSIEF

SEQ ID NO: 1509 - protein, 10 aa, synthetic construct
FPESSAIEAL

SEQ ID NO: 1510 - protein, 8 aa, synthetic construct
FPEVFTTY

SEQ ID NO: 1511 - protein, 9 aa, synthetic construct
FPFDVAVKF

SEQ ID NO: 1512 - protein, 8 aa, synthetic construct
FPFEAEAY

SEQ ID NO: 1513 - protein, 9 aa, synthetic construct
FPFHSAPAL

SEQ ID NO: 1514 - protein, 11 aa, synthetic construct
FPFLPGGPPEY

SEQ ID NO: 1515 - protein, 9 aa, synthetic construct
FPFPVTVSL

SEQ ID NO: 1516 - protein, 11 aa, synthetic construct
FPFRPRPVQNF

SEQ ID NO: 1517 - protein, 10 aa, synthetic construct
FPFSDKLGEL

SEQ ID NO: 1518 - protein, 9 aa, synthetic construct
FPFVDDNEV

SEQ ID NO: 1519 - protein, 9 aa, synthetic construct
FPGACGLRY

SEQ ID NO: 1520 - protein, 9 aa, synthetic construct
FPGELLLRL

SEQ ID NO: 1521 - protein, 9 aa, synthetic construct
FPGFPAAAY

SEQ ID NO: 1522 - protein, 9 aa, synthetic construct
FPHLLAHTY

SEQ ID NO: 1523 - protein, 9 aa, synthetic construct
FPHLLQPVL

SEQ ID NO: 1524 - protein, 9 aa, synthetic construct
FPHLPGKTF

SEQ ID NO: 1525 - protein, 9 aa, synthetic construct
FPHLTVVLL

SEQ ID NO: 1526 - protein, 10 aa, synthetic construct
FPHPVNQVTF

SEQ ID NO: 1527 - protein, 10 aa, synthetic construct
FPHQPSALGY

SEQ ID NO: 1528 - protein, 9 aa, synthetic construct
FPIDKPPSF

SEQ ID NO: 1529 - protein, 11 aa, synthetic construct
FPIIRDQIFRY

SEQ ID NO: 1530 - protein, 9 aa, synthetic construct
FPIPLINRL

SEQ ID NO: 1531 - protein, 10 aa, synthetic construct
FPKAPEFPSY

SEQ ID NO: 1532 - protein, 10 aa, synthetic construct
FPLDNEVKAF

SEQ ID NO: 1533 - protein, 11 aa, synthetic construct
FPLDVGSIVGY

SEQ ID NO: 1534 - protein, 9 aa, synthetic construct
FPLEAITAF

SEQ ID NO: 1535 - protein, 11 aa, synthetic construct
FPLIEVNKVYY

SEQ ID NO: 1536 - protein, 8 aa, synthetic construct
FPLLATAY

SEQ ID NO: 1537 - protein, 11 aa, synthetic construct
FPLLPQDVHLL

SEQ ID NO: 1538 - protein, 9 aa, synthetic construct
FPLSELVEF

SEQ ID NO: 1539 - protein, 9 aa, synthetic construct
FPLSHLDAL

SEQ ID NO: 1540 - protein, 8 aa, synthetic construct
FPMEIRQY

SEQ ID NO: 1541 - protein, 9 aa, synthetic construct
FPMSPVTSV

SEQ ID NO: 1542 - protein, 9 aa, synthetic construct
FPMTMDEKY

SEQ ID NO: 1543 - protein, 9 aa, synthetic construct
FPNALVTKL

SEQ ID NO: 1544 - protein, 9 aa, synthetic construct
FPNDPHVQY

SEQ ID NO: 1545 - protein, 9 aa, synthetic construct
FPNENQVVF

SEQ ID NO: 1546 - protein, 11 aa, synthetic construct
FPNIVIKGSEL

SEQ ID NO: 1547 - protein, 8 aa, synthetic construct
FPNLARVL

SEQ ID NO: 1548 - protein, 10 aa, synthetic construct
FPPPFGGPGF

SEQ ID NO: 1549 - protein, 9 aa, synthetic construct
FPQIGQIQY

SEQ ID NO: 1550 - protein, 9 aa, synthetic construct
FPQLDSTSF

SEQ ID NO: 1551 - protein, 9 aa, synthetic construct
FPQYAPPVM

SEQ ID NO: 1552 - protein, 9 aa, synthetic construct
FPSAKDPTW

SEQ ID NO: 1553 - protein, 9 aa, synthetic construct
FPSGETIVM

SEQ ID NO: 1554 - protein, 9 aa, synthetic construct
FPSIYDVKY

SEQ ID NO: 1555 - protein, 10 aa, synthetic construct
FPSPILKVQY

SEQ ID NO: 1556 - protein, 9 aa, synthetic construct
FPSSNVHVY

SEQ ID NO: 1557 - protein, 8 aa, synthetic construct
FPTISLEF

SEQ ID NO: 1558 - protein, 9 aa, synthetic construct
FPTPDPAAL

SEQ ID NO: 1559 - protein, 9 aa, synthetic construct
FPTVQHQEL

SEQ ID NO: 1560 - protein, 9 aa, synthetic construct
FPTYPVPHY

SEQ ID NO: 1561 - protein, 10 aa, synthetic construct
FPVEEKAVEY

SEQ ID NO: 1562 - protein, 11 aa, synthetic construct
FPVEEKAVEYY

SEQ ID NO: 1563 - protein, 10 aa, synthetic construct
FPVEEQDRVL

SEQ ID NO: 1564 - protein, 9 aa, synthetic construct
FPVGPGTGF

SEQ ID NO: 1565 - protein, 10 aa, synthetic construct
FPVGPGTGFL

SEQ ID NO: 1566 - protein, 11 aa, synthetic construct
FPVGPGTGFLY

SEQ ID NO: 1567 - protein, 9 aa, synthetic construct
FPVGVFVVA

SEQ ID NO: 1568 - protein, 9 aa, synthetic construct
FPVIYDVKY

SEQ ID NO: 1569 - protein, 10 aa, synthetic construct
FPVNEVFTQF

SEQ ID NO: 1570 - protein, 10 aa, synthetic construct
FPVPGSGLVL

SEQ ID NO: 1571 - protein, 9 aa, synthetic construct
FPVPKPIDY

SEQ ID NO: 1572 - protein, 9 aa, synthetic construct
FPVSPETPY

SEQ ID NO: 1573 - protein, 10 aa, synthetic construct
FPWPQPLSTL

SEQ ID NO: 1574 - protein, 10 aa, synthetic construct
FPWTVPSQEY

SEQ ID NO: 1575 - protein, 10 aa, synthetic construct
FPYDYSASEY

SEQ ID NO: 1576 - protein, 9 aa, synthetic construct
FPYGDASKF

SEQ ID NO: 1577 - protein, 9 aa, synthetic construct
FPYGTTVTY

SEQ ID NO: 1578 - protein, 10 aa, synthetic construct
FPYIEAEVKY

SEQ ID NO: 1579 - protein, 9 aa, synthetic construct
FPYPFQVVY

SEQ ID NO: 1580 - protein, 10 aa, synthetic construct
FPYQDKLVGY

SEQ ID NO: 1581 - protein, 11 aa, synthetic construct
FPYYPSPGVLF

SEQ ID NO: 1582 - protein, 8 aa, synthetic construct
FQFKPIRV

SEQ ID NO: 1583 - protein, 8 aa, synthetic construct
FQHVGQTL

SEQ ID NO: 1584 - protein, 9 aa, synthetic construct
FQNEVARQL

SEQ ID NO: 1585 - protein, 9 aa, synthetic construct
FQNPFRSEL

SEQ ID NO: 1586 - protein, 9 aa, synthetic construct
FQYPDTRYL

SEQ ID NO: 1587 - protein, 9 aa, synthetic construct
FRADNLNKL

SEQ ID NO: 1588 - protein, 9 aa, synthetic construct
FRIAFEQQL

SEQ ID NO: 1589 - protein, 9 aa, synthetic construct
FRIEGLAPK

SEQ ID NO: 1590 - protein, 9 aa, synthetic construct
FRIEYEPLV

SEQ ID NO: 1591 - protein, 11 aa, synthetic construct
FRLFPVPGSGL

SEQ ID NO: 1592 - protein, 9 aa, synthetic construct
FRNFKIIYR

SEQ ID NO: 1593 - protein, 9 aa, synthetic construct
FRNGLGNQL

SEQ ID NO: 1594 - protein, 9 aa, synthetic construct
FRPLYTHEY

SEQ ID NO: 1595 - protein, 9 aa, synthetic construct
FRPPITQEI

SEQ ID NO: 1596 - protein, 9 aa, synthetic construct
FRTSSVLRL

SEQ ID NO: 1597 - protein, 9 aa, synthetic construct
FRVLVVSAK

SEQ ID NO: 1598 - protein, 9 aa, synthetic construct
FRYNGLIHR

SEQ ID NO: 1599 - protein, 10 aa, synthetic construct
FRYNGLIHRK

SEQ ID NO: 1600 - protein, 9 aa, synthetic construct
FRYPQDYQF

SEQ ID NO: 1601 - protein, 9 aa, synthetic construct
FSDIHDFEY

SEQ ID NO: 1602 - protein, 9 aa, synthetic construct
FSDLYNEVY

SEQ ID NO: 1603 - protein, 9 aa, synthetic construct
FSDVNMQEY

SEQ ID NO: 1604 - protein, 8 aa, synthetic construct
FSELAEDK

SEQ ID NO: 1605 - protein, 8 aa, synthetic construct
FSFSGNTL

SEQ ID NO: 1606 - protein, 10 aa, synthetic construct
FSGLRGAIAF

SEQ ID NO: 1607 - protein, 10 aa, synthetic construct
FSGLVSTGLK

SEQ ID NO: 1608 - protein, 10 aa, synthetic construct
FSISNANIKI

SEQ ID NO: 1609 - protein, 11 aa, synthetic construct
FSLENNFLLQH

SEQ ID NO: 1610 - protein, 9 aa, synthetic construct
FSNSADDIK

SEQ ID NO: 1611 - protein, 9 aa, synthetic construct
FSPLPTPAL

SEQ ID NO: 1612 - protein, 9 aa, synthetic construct
FSQFGPIER

SEQ ID NO: 1613 - protein, 9 aa, synthetic construct
FSSPAGGVL

SEQ ID NO: 1614 - protein, 9 aa, synthetic construct
FSSPGGLSL

SEQ ID NO: 1615 - protein, 9 aa, synthetic construct
FSTGNFNVL

SEQ ID NO: 1616 - protein, 9 aa, synthetic construct
FTAEFSSRY

SEQ ID NO: 1617 - protein, 9 aa, synthetic construct
FTAERSSYY

SEQ ID NO: 1618 - protein, 9 aa, synthetic construct
FTDAGLKEL

SEQ ID NO: 1619 - protein, 9 aa, synthetic construct
FTDEESRVF

SEQ ID NO: 1620 - protein, 9 aa, synthetic construct
FTDPGQVAY

SEQ ID NO: 1621 - protein, 9 aa, synthetic construct
FTDPHIITF

SEQ ID NO: 1622 - protein, 10 aa, synthetic construct
FTDVNSILRY

SEQ ID NO: 1623 - protein, 9 aa, synthetic construct
FTEAGLKEL

SEQ ID NO: 1624 - protein, 9 aa, synthetic construct
FTEEQAVLY

SEQ ID NO: 1625 - protein, 11 aa, synthetic construct
FTENDKEYQEY

SEQ ID NO: 1626 - protein, 10 aa, synthetic construct
FTFDNVLPGK

SEQ ID NO: 1627 - protein, 10 aa, synthetic construct
FTMDVIGGKY

SEQ ID NO: 1628 - protein, 9 aa, synthetic construct
FTNEETVSF

SEQ ID NO: 1629 - protein, 9 aa, synthetic construct
FTVPHTHVF

SEQ ID NO: 1630 - protein, 10 aa, synthetic construct
FVALSTNTTK

SEQ ID NO: 1631 - protein, 9 aa, synthetic construct
FVCDIRPEI

SEQ ID NO: 1632 - protein, 11 aa, synthetic construct
FVDGLMIHSGD

SEQ ID NO: 1633 - protein, 10 aa, synthetic construct
FVDPNGKISL

SEQ ID NO: 1634 - protein, 9 aa, synthetic construct
FVFPGELLL

SEQ ID NO: 1635 - protein, 8 aa, synthetic construct
FVHQTAIK

SEQ ID NO: 1636 - protein, 9 aa, synthetic construct
FVIDTTPGM

SEQ ID NO: 1637 - protein, 9 aa, synthetic construct
FVIEEKHGF

SEQ ID NO: 1638 - protein, 9 aa, synthetic construct
FVIETARQL

SEQ ID NO: 1639 - protein, 9 aa, synthetic construct
FVIFGATSL

SEQ ID NO: 1640 - protein, 9 aa, synthetic construct
FVIGCYLDR

SEQ ID NO: 1641 - protein, 8 aa, synthetic construct
FVIPLHSA

SEQ ID NO: 1642 - protein, 10 aa, synthetic construct
FVMDDTISPY

SEQ ID NO: 1643 - protein, 8 aa, synthetic construct
FVPVANEL

SEQ ID NO: 1644 - protein, 10 aa, synthetic construct
FVPYFEAIQK

SEQ ID NO: 1645 - protein, 9 aa, synthetic construct
FVSEISDEF

SEQ ID NO: 1646 - protein, 9 aa, synthetic construct
FVSGVKIFY

SEQ ID NO: 1647 - protein, 9 aa, synthetic construct
FVTSSHLQL

SEQ ID NO: 1648 - protein, 9 aa, synthetic construct
FVVDHCPYM

SEQ ID NO: 1649 - protein, 9 aa, synthetic construct
FVVEQVESY

SEQ ID NO: 1650 - protein, 9 aa, synthetic construct
FVVSGLLHV

SEQ ID NO: 1651 - protein, 9 aa, synthetic construct
FVYENPISL

SEQ ID NO: 1652 - protein, 10 aa, synthetic construct
FVYEVTSTKY

SEQ ID NO: 1653 - protein, 9 aa, synthetic construct
FVYGEPREL

SEQ ID NO: 1654 - protein, 9 aa, synthetic construct
FWDPSVNLF

SEQ ID NO: 1655 - protein, 9 aa, synthetic construct
FYDDKVSAL

SEQ ID NO: 1656 - protein, 9 aa, synthetic construct
FYDERIVVV

SEQ ID NO: 1657 - protein, 8 aa, synthetic construct
FYDLCELF

SEQ ID NO: 1658 - protein, 9 aa, synthetic construct
FYDSQPTLI

SEQ ID NO: 1659 - protein, 9 aa, synthetic construct
FYEDNVLYM

SEQ ID NO: 1660 - protein, 8 aa, synthetic construct
FYEGVVEL

SEQ ID NO: 1661 - protein, 10 aa, synthetic construct
FYLEGGFSKF

SEQ ID NO: 1662 - protein, 9 aa, synthetic construct
GAAGVHFIY

SEQ ID NO: 1663 - protein, 11 aa, synthetic construct
GAAGVHFIYTR

SEQ ID NO: 1664 - protein, 8 aa, synthetic construct
GAEFAPNK

SEQ ID NO: 1665 - protein, 9 aa, synthetic construct
GAEVYHTLK

SEQ ID NO: 1666 - protein, 9 aa, synthetic construct
GAFDGIMYY

SEQ ID NO: 1667 - protein, 10 aa, synthetic construct
GAGGALFVHR

SEQ ID NO: 1668 - protein, 9 aa, synthetic construct
GAHGIIVVY

SEQ ID NO: 1669 - protein, 11 aa, synthetic construct
GAIQFVTHYQH

SEQ ID NO: 1670 - protein, 11 aa, synthetic construct
GAIQFVTQYQH

SEQ ID NO: 1671 - protein, 9 aa, synthetic construct
GAMGIILVY

SEQ ID NO: 1672 - protein, 10 aa, synthetic construct
GAPQTHLGLK

SEQ ID NO: 1673 - protein, 11 aa, synthetic construct
GAVHDVKDVLD

SEQ ID NO: 1674 - protein, 9 aa, synthetic construct
GAVPAAAAL

SEQ ID NO: 1675 - protein, 9 aa, synthetic construct
GAYGQAVRY

SEQ ID NO: 1676 - protein, 9 aa, synthetic construct
GDFAAEYAK

SEQ ID NO: 1677 - protein, 10 aa, synthetic construct
GDLGNVTADK

SEQ ID NO: 1678 - protein, 10 aa, synthetic construct
GEADVPFYYA

SEQ ID NO: 1679 - protein, 10 aa, synthetic construct
GEASFVWNVA

SEQ ID NO: 1680 - protein, 9 aa, synthetic construct
GEAWPFESV

SEQ ID NO: 1681 - protein, 9 aa, synthetic construct
GECSFPLNA

SEQ ID NO: 1682 - protein, 9 aa, synthetic construct
GEDEPLHAL

SEQ ID NO: 1683 - protein, 10 aa, synthetic construct
GEDPQGTLVP

SEQ ID NO: 1684 - protein, 10 aa, synthetic construct
GEETGIDVTL

SEQ ID NO: 1685 - protein, 10 aa, synthetic construct
GEFADPFKLA

SEQ ID NO: 1686 - protein, 10 aa, synthetic construct
GEFGGFGSVT

SEQ ID NO: 1687 - protein, 11 aa, synthetic construct
GEFGGFGSVTG

SEQ ID NO: 1688 - protein, 10 aa, synthetic construct
GEFPGGLMGP

SEQ ID NO: 1689 - protein, 9 aa, synthetic construct
GEFQSFSSA

SEQ ID NO: 1690 - protein, 9 aa, synthetic construct
GEHGLIIRV

SEQ ID NO: 1691 - protein, 10 aa, synthetic construct
GEHPGLSIGD

SEQ ID NO: 1692 - protein, 9 aa, synthetic construct
GEIASFDKA

SEQ ID NO: 1693 - protein, 10 aa, synthetic construct
GEIDASLKAP

SEQ ID NO: 1694 - protein, 9 aa, synthetic construct
GEIENIELP

SEQ ID NO: 1695 - protein, 9 aa, synthetic construct
GEIFDQCVA

SEQ ID NO: 1696 - protein, 10 aa, synthetic construct
GEIGRNGPLP

SEQ ID NO: 1697 - protein, 9 aa, synthetic construct
GEIKGFTGI

SEQ ID NO: 1698 - protein, 9 aa, synthetic construct
GEINVIGEP

SEQ ID NO: 1699 - protein, 10 aa, synthetic construct
GEIPAELRAA

SEQ ID NO: 1700 - protein, 9 aa, synthetic construct
GEIPAMAQP

SEQ ID NO: 1701 - protein, 9 aa, synthetic construct
GEIPKVLVA

SEQ ID NO: 1702 - protein, 10 aa, synthetic construct
GEKNNAFIVA

SEQ ID NO: 1703 - protein, 9 aa, synthetic construct
GEKPGFLAP

SEQ ID NO: 1704 - protein, 11 aa, synthetic construct
GELDMRKIGQA

SEQ ID NO: 1705 - protein, 10 aa, synthetic construct
GELLERLSSA

SEQ ID NO: 1706 - protein, 9 aa, synthetic construct
GELPLATAF

SEQ ID NO: 1707 - protein, 9 aa, synthetic construct
GELYVFNTP

SEQ ID NO: 1708 - protein, 9 aa, synthetic construct
GEMEPPALP

SEQ ID NO: 1709 - protein, 9 aa, synthetic construct
GENEGGIDK

SEQ ID NO: 1710 - protein, 10 aa, synthetic construct
GENIAESLVA

SEQ ID NO: 1711 - protein, 10 aa, synthetic construct
GEPSFSTPVP

SEQ ID NO: 1712 - protein, 9 aa, synthetic construct
GEREIWNQI

SEQ ID NO: 1713 - protein, 10 aa, synthetic construct
GESHIGGVLL

SEQ ID NO: 1714 - protein, 11 aa, synthetic construct
GESHIGGVLLK

SEQ ID NO: 1715 - protein, 8 aa, synthetic construct
GETAFIAP

SEQ ID NO: 1716 - protein, 9 aa, synthetic construct
GETQGLLTA

SEQ ID NO: 1717 - protein, 9 aa, synthetic construct
GEVFPTTEV

SEQ ID NO: 1718 - protein, 9 aa, synthetic construct
GEVGKLRIA

SEQ ID NO: 1719 - protein, 9 aa, synthetic construct
GEVSFYNVT

SEQ ID NO: 1720 - protein, 9 aa, synthetic construct
GEVVDCTIK

SEQ ID NO: 1721 - protein, 9 aa, synthetic construct
GEYDWALQA

SEQ ID NO: 1722 - protein, 9 aa, synthetic construct
GEYEWVHKP

SEQ ID NO: 1723 - protein, 9 aa, synthetic construct
GEYGGWYKA

SEQ ID NO: 1724 - protein, 9 aa, synthetic construct
GEYINQIAA

SEQ ID NO: 1725 - protein, 10 aa, synthetic construct
GEYIPGACSA

SEQ ID NO: 1726 - protein, 9 aa, synthetic construct
GEYKFFWTA

SEQ ID NO: 1727 - protein, 10 aa, synthetic construct
GEYMAGQLAA

SEQ ID NO: 1728 - protein, 8 aa, synthetic construct
GEYPATLV

SEQ ID NO: 1729 - protein, 9 aa, synthetic construct
GEYPATLVS

SEQ ID NO: 1730 - protein, 8 aa, synthetic construct
GFEPASLK

SEQ ID NO: 1731 - protein, 8 aa, synthetic construct
GFQAVTGK

SEQ ID NO: 1732 - protein, 9 aa, synthetic construct
GGALDAAAK

SEQ ID NO: 1733 - protein, 8 aa, synthetic construct
GGDTIFGK

SEQ ID NO: 1734 - protein, 8 aa, synthetic construct
GGEPWGAK

SEQ ID NO: 1735 - protein, 11 aa, synthetic construct
GGFNRPLDFIA

SEQ ID NO: 1736 - protein, 9 aa, synthetic construct
GGGFSSGGF

SEQ ID NO: 1737 - protein, 11 aa, synthetic construct
GGGFSSGGFSG

SEQ ID NO: 1738 - protein, 10 aa, synthetic construct
GGGSFGGGSF

SEQ ID NO: 1739 - protein, 10 aa, synthetic construct
GGHGPSFPLK

SEQ ID NO: 1740 - protein, 9 aa, synthetic construct
GHGPSFPLK

SEQ ID NO: 1741 - protein, 11 aa, synthetic construct
GHVFEESQVAG

SEQ ID NO: 1742 - protein, 9 aa, synthetic construct
GIGSVLPLK

SEQ ID NO: 1743 - protein, 8 aa, synthetic construct
GITALHIK

SEQ ID NO: 1744 - protein, 11 aa, synthetic construct
GITNALSEEDK

SEQ ID NO: 1745 - protein, 9 aa, synthetic construct
GLADKVYFL

SEQ ID NO: 1746 - protein, 9 aa, synthetic construct
GLATDVQTV

SEQ ID NO: 1747 - protein, 9 aa, synthetic construct
GLGEGAEEK

SEQ ID NO: 1748 - protein, 9 aa, synthetic construct
GLIEILKKV

SEQ ID NO: 1749 - protein, 9 aa, synthetic construct
GLIGVTDSY

SEQ ID NO: 1750 - protein, 9 aa, synthetic construct
GLSPATTYY

SEQ ID NO: 1751 - protein, 8 aa, synthetic construct
GLVGLELK

SEQ ID NO: 1752 - protein, 10 aa, synthetic construct
GLVLLAQGNT

SEQ ID NO: 1753 - protein, 9 aa, synthetic construct
GLYSRQLYV

SEQ ID NO: 1754 - protein, 9 aa, synthetic construct
GMDPITRQV

SEQ ID NO: 1755 - protein, 10 aa, synthetic construct
GMHYFSPVDK

SEQ ID NO: 1756 - protein, 9 aa, synthetic construct
GMYIFLHTV

SEQ ID NO: 1757 - protein, 9 aa, synthetic construct
GMYPNLVHV

SEQ ID NO: 1758 - protein, 9 aa, synthetic construct
GMYVFLHAV

SEQ ID NO: 1759 - protein, 8 aa, synthetic construct
GNFSTDIK

SEQ ID NO: 1760 - protein, 11 aa, synthetic construct
GNLGAADIDHK

SEQ ID NO: 1761 - protein, 8 aa, synthetic construct
GNLTVVGK

SEQ ID NO: 1762 - protein, 10 aa, synthetic construct
GNPITIFQER

SEQ ID NO: 1763 - protein, 9 aa, synthetic construct
GPAEKPPLR

SEQ ID NO: 1764 - protein, 9 aa, synthetic construct
GPFEYEVGY

SEQ ID NO: 1765 - protein, 9 aa, synthetic construct
GPFSETYTF

SEQ ID NO: 1766 - protein, 10 aa, synthetic construct
GPGPGPTTPL

SEQ ID NO: 1767 - protein, 8 aa, synthetic construct
GPLGLSPK

SEQ ID NO: 1768 - protein, 8 aa, synthetic construct
GPNYTPGK

SEQ ID NO: 1769 - protein, 10 aa, synthetic construct
GPPVSELITK

SEQ ID NO: 1770 - protein, 9 aa, synthetic construct
GPQFQFKTI

SEQ ID NO: 1771 - protein, 8 aa, synthetic construct
GPQLFHMD

SEQ ID NO: 1772 - protein, 9 aa, synthetic construct
GPTYVVLAY

SEQ ID NO: 1773 - protein, 9 aa, synthetic construct
GPVGVNVTY

SEQ ID NO: 1774 - protein, 9 aa, synthetic construct
GPYEVEVTY

SEQ ID NO: 1775 - protein, 9 aa, synthetic construct
GQFCIPEHI

SEQ ID NO: 1776 - protein, 10 aa, synthetic construct
GQFKDIITKV

SEQ ID NO: 1777 - protein, 8 aa, synthetic construct
GQFKTYAI

SEQ ID NO: 1778 - protein, 8 aa, synthetic construct
GQFQVIQV

SEQ ID NO: 1779 - protein, 8 aa, synthetic construct
GQFVTEEV

SEQ ID NO: 1780 - protein, 9 aa, synthetic construct
GQGTFGEVF

SEQ ID NO: 1781 - protein, 10 aa, synthetic construct
GQGTFTKIFK

SEQ ID NO: 1782 - protein, 8 aa, synthetic construct
GQICLPII

SEQ ID NO: 1783 - protein, 9 aa, synthetic construct
GQIELRTYV

SEQ ID NO: 1784 - protein, 9 aa, synthetic construct
GQNLWGPHR

SEQ ID NO: 1785 - protein, 9 aa, synthetic construct
GQQIQIQTV

SEQ ID NO: 1786 - protein, 9 aa, synthetic construct
GQSELTLLL

SEQ ID NO: 1787 - protein, 8 aa, synthetic construct
GQTGVLTV

SEQ ID NO: 1788 - protein, 9 aa, synthetic construct
GQTKEVLVI

SEQ ID NO: 1789 - protein, 8 aa, synthetic construct
GQVITASV

SEQ ID NO: 1790 - protein, 9 aa, synthetic construct
GQVLGVIGY

SEQ ID NO: 1791 - protein, 9 aa, synthetic construct
GQVQKIVLY

SEQ ID NO: 1792 - protein, 8 aa, synthetic construct
GQVVMLYI

SEQ ID NO: 1793 - protein, 9 aa, synthetic construct
GQYLFKCLI

SEQ ID NO: 1794 - protein, 9 aa, synthetic construct
GQYPRALEL

SEQ ID NO: 1795 - protein, 8 aa, synthetic construct
GQYQATLI

SEQ ID NO: 1796 - protein, 9 aa, synthetic construct
GQYYAIKKI

SEQ ID NO: 1797 - protein, 9 aa, synthetic construct
GRADALRVL

SEQ ID NO: 1798 - protein, 10 aa, synthetic construct
GRADGISSTF

SEQ ID NO: 1799 - protein, 11 aa, synthetic construct
GRADKVGFFVK

SEQ ID NO: 1800 - protein, 9 aa, synthetic construct
GRADLVMSF

SEQ ID NO: 1801 - protein, 9 aa, synthetic construct
GRAFLFNKV

SEQ ID NO: 1802 - protein, 9 aa, synthetic construct
GRAIITKSF

SEQ ID NO: 1803 - protein, 10 aa, synthetic construct
GRCQLAGYGF

SEQ ID NO: 1804 - protein, 9 aa, synthetic construct
GRCVNQWQL

SEQ ID NO: 1805 - protein, 10 aa, synthetic construct
GRFDITIGPK

SEQ ID NO: 1806 - protein, 9 aa, synthetic construct
GRFEDVYQL

SEQ ID NO: 1807 - protein, 9 aa, synthetic construct
GRFFLSSGL

SEQ ID NO: 1808 - protein, 11 aa, synthetic construct
GRFGYLEGQEY

SEQ ID NO: 1809 - protein, 9 aa, synthetic construct
GRFITVMKF

SEQ ID NO: 1810 - protein, 10 aa, synthetic construct
GRFNGQFKTY

SEQ ID NO: 1811 - protein, 10 aa, synthetic construct
GRFPDGTNGL

SEQ ID NO: 1812 - protein, 9 aa, synthetic construct
GRFPQVQAF

SEQ ID NO: 1813 - protein, 9 aa, synthetic construct
GRFPRLLTR

SEQ ID NO: 1814 - protein, 9 aa, synthetic construct
GRFSGLLGR

SEQ ID NO: 1815 - protein, 11 aa, synthetic construct
GRFTAAELLSF

SEQ ID NO: 1816 - protein, 9 aa, synthetic construct
GRGWFPKSY

SEQ ID NO: 1817 - protein, 9 aa, synthetic construct
GRHGVFLEL

SEQ ID NO: 1818 - protein, 9 aa, synthetic construct
GRIDIKQLI

SEQ ID NO: 1819 - protein, 11 aa, synthetic construct
GRIDIKQLIAK

SEQ ID NO: 1820 - protein, 10 aa, synthetic construct
GRIGVVISSY

SEQ ID NO: 1821 - protein, 11 aa, synthetic construct
GRILSGVVTKM

SEQ ID NO: 1822 - protein, 9 aa, synthetic construct
GRITHGFQL

SEQ ID NO: 1823 - protein, 9 aa, synthetic construct
GRIVAFFEF

SEQ ID NO: 1824 - protein, 9 aa, synthetic construct
GRIVTLISF

SEQ ID NO: 1825 - protein, 10 aa, synthetic construct
GRKVFVEIPK

SEQ ID NO: 1826 - protein, 10 aa, synthetic construct
GRLAIVGGGY

SEQ ID NO: 1827 - protein, 10 aa, synthetic construct
GRLDLQYAKL

SEQ ID NO: 1828 - protein, 10 aa, synthetic construct
GRLGGIAVAY

SEQ ID NO: 1829 - protein, 10 aa, synthetic construct
GRLKDIALGM

SEQ ID NO: 1830 - protein, 9 aa, synthetic construct
GRLLGIITK

SEQ ID NO: 1831 - protein, 10 aa, synthetic construct
GRLLILRAPR

SEQ ID NO: 1832 - protein, 9 aa, synthetic construct
GRLLVATTF

SEQ ID NO: 1833 - protein, 9 aa, synthetic construct
GRLRFWIHM

SEQ ID NO: 1834 - protein, 9 aa, synthetic construct
GRLWCATTY

SEQ ID NO: 1835 - protein, 9 aa, synthetic construct
GRNFWVSGL

SEQ ID NO: 1836 - protein, 9 aa, synthetic construct
GRNPFVHEL

SEQ ID NO: 1837 - protein, 11 aa, synthetic construct
GRNSNICHYTF

SEQ ID NO: 1838 - protein, 10 aa, synthetic construct
GRSSVILLTY

SEQ ID NO: 1839 - protein, 9 aa, synthetic construct
GRTEVSFTL

SEQ ID NO: 1840 - protein, 9 aa, synthetic construct
GRTKIFIRF

SEQ ID NO: 1841 - protein, 9 aa, synthetic construct
GRTNLIVNY

SEQ ID NO: 1842 - protein, 9 aa, synthetic construct
GRTSLTNLL

SEQ ID NO: 1843 - protein, 9 aa, synthetic construct
GRTYLKYSI

SEQ ID NO: 1844 - protein, 11 aa, synthetic construct
GRVESVKILPK

SEQ ID NO: 1845 - protein, 9 aa, synthetic construct
GRVIQIVLM

SEQ ID NO: 1846 - protein, 9 aa, synthetic construct
GRVLLVLMF

SEQ ID NO: 1847 - protein, 9 aa, synthetic construct
GRVNVVEAL

SEQ ID NO: 1848 - protein, 10 aa, synthetic construct
GRWACQSCTF

SEQ ID NO: 1849 - protein, 9 aa, synthetic construct
GRWFGGRQI

SEQ ID NO: 1850 - protein, 11 aa, synthetic construct
GRWNNVKPIRL

SEQ ID NO: 1851 - protein, 10 aa, synthetic construct
GRWPGSSLYY

SEQ ID NO: 1852 - protein, 10 aa, synthetic construct
GSDQSENVDR

SEQ ID NO: 1853 - protein, 9 aa, synthetic construct
GSEHYDVAR

SEQ ID NO: 1854 - protein, 10 aa, synthetic construct
GSGGSIRSSY

SEQ ID NO: 1855 - protein, 9 aa, synthetic construct
GSMGLRSLW

SEQ ID NO: 1856 - protein, 10 aa, synthetic construct
GSPETLTNLR

SEQ ID NO: 1857 - protein, 10 aa, synthetic construct
GSSDGTIRLW

SEQ ID NO: 1858 - protein, 11 aa, synthetic construct
GSVLLESNPYR

SEQ ID NO: 1859 - protein, 8 aa, synthetic construct
GSWDSFLK

SEQ ID NO: 1860 - protein, 10 aa, synthetic construct
GSYDPQQIFK

SEQ ID NO: 1861 - protein, 10 aa, synthetic construct
GSYTFDPVTK

SEQ ID NO: 1862 - protein, 9 aa, synthetic construct
GSYVFENTV

SEQ ID NO: 1863 - protein, 9 aa, synthetic construct
GTDELRLLY

SEQ ID NO: 1864 - protein, 9 aa, synthetic construct
GTINIVHPK

SEQ ID NO: 1865 - protein, 10 aa, synthetic construct
GTINIVHPKL

SEQ ID NO: 1866 - protein, 10 aa, synthetic construct
GTITTFEHAH

SEQ ID NO: 1867 - protein, 9 aa, synthetic construct
GTLSSWNLK

SEQ ID NO: 1868 - protein, 9 aa, synthetic construct
GTMEWIMIK

SEQ ID NO: 1869 - protein, 11 aa, synthetic construct
GTVDVTPFIKK

SEQ ID NO: 1870 - protein, 9 aa, synthetic construct
GTYGFWYPK

SEQ ID NO: 1871 - protein, 11 aa, synthetic construct
GVAGVGAGLAY

SEQ ID NO: 1872 - protein, 11 aa, synthetic construct
GVDSSIFQNPK

SEQ ID NO: 1873 - protein, 10 aa, synthetic construct
GVEGSLIVEK

SEQ ID NO: 1874 - protein, 9 aa, synthetic construct
GVEPAADGK

SEQ ID NO: 1875 - protein, 10 aa, synthetic construct
GVFRGPVLPK

SEQ ID NO: 1876 - protein, 10 aa, synthetic construct
GVGVDLSNIF

SEQ ID NO: 1877 - protein, 8 aa, synthetic construct
GVHAFQQR

SEQ ID NO: 1878 - protein, 10 aa, synthetic construct
GVIDGHIYAV

SEQ ID NO: 1879 - protein, 10 aa, synthetic construct
GVIEKLLTSY

SEQ ID NO: 1880 - protein, 11 aa, synthetic construct
GVIILDEAHER

SEQ ID NO: 1881 - protein, 10 aa, synthetic construct
GVIPYFPYSK

SEQ ID NO: 1882 - protein, 10 aa, synthetic construct
GVLAHLEEER

SEQ ID NO: 1883 - protein, 10 aa, synthetic construct
GVLDAILATK

SEQ ID NO: 1884 - protein, 10 aa, synthetic construct
GVLEADLPNY

SEQ ID NO: 1885 - protein, 11 aa, synthetic construct
GVLGLDLWQVK

SEQ ID NO: 1886 - protein, 10 aa, synthetic construct
GVLHPDVITK

SEQ ID NO: 1887 - protein, 11 aa, synthetic construct
GVQGFQDYIEK

SEQ ID NO: 1888 - protein, 9 aa, synthetic construct
GVSAATFLK

SEQ ID NO: 1889 - protein, 8 aa, synthetic construct
GVSLAALK

SEQ ID NO: 1890 - protein, 9 aa, synthetic construct
GVSQVLSTY

SEQ ID NO: 1891 - protein, 8 aa, synthetic construct
GVTANDVK

SEQ ID NO: 1892 - protein, 9 aa, synthetic construct
GVTHICPVY

SEQ ID NO: 1893 - protein, 11 aa, synthetic construct
GVTIKPTVDDD

SEQ ID NO: 1894 - protein, 10 aa, synthetic construct
GVYNLEIVDK

SEQ ID NO: 1895 - protein, 8 aa, synthetic construct
GWYHTGPK

SEQ ID NO: 1896 - protein, 9 aa, synthetic construct
GYIPIYTPF

SEQ ID NO: 1897 - protein, 9 aa, synthetic construct
GYSPYQLTW

SEQ ID NO: 1898 - protein, 9 aa, synthetic construct
HAADVFEAY

SEQ ID NO: 1899 - protein, 9 aa, synthetic construct
HAAMLGLMY

SEQ ID NO: 1900 - protein, 9 aa, synthetic construct
HADDFIQEM

SEQ ID NO: 1901 - protein, 9 aa, synthetic construct
HADDSFLVL

SEQ ID NO: 1902 - protein, 9 aa, synthetic construct
HADLLIVVF

SEQ ID NO: 1903 - protein, 8 aa, synthetic construct
HAFIQPEI

SEQ ID NO: 1904 - protein, 10 aa, synthetic construct
HAFQAVTEFY

SEQ ID NO: 1905 - protein, 11 aa, synthetic construct
HAGPPYEDIAF

SEQ ID NO: 1906 - protein, 9 aa, synthetic construct
HALERLFTM

SEQ ID NO: 1907 - protein, 9 aa, synthetic construct
HALPLFTSL

SEQ ID NO: 1908 - protein, 10 aa, synthetic construct
HALYAICDVF

SEQ ID NO: 1909 - protein, 10 aa, synthetic construct
HASDVLENAF

SEQ ID NO: 1910 - protein, 9 aa, synthetic construct
HATFNDPVM

SEQ ID NO: 1911 - protein, 9 aa, synthetic construct
HAVIDINAF

SEQ ID NO: 1912 - protein, 9 aa, synthetic construct
HAVVTVPAY

SEQ ID NO: 1913 - protein, 9 aa, synthetic construct
HCAEPFTEY

SEQ ID NO: 1914 - protein, 10 aa, synthetic construct
HEFLHEVPAA

SEQ ID NO: 1915 - protein, 10 aa, synthetic construct
HESAVTGLSL

SEQ ID NO: 1916 - protein, 11 aa, synthetic construct
HETWSGHVISS

SEQ ID NO: 1917 - protein, 9 aa, synthetic construct
HFDIVIRNL

SEQ ID NO: 1918 - protein, 9 aa, synthetic construct
HFDLNLRQF

SEQ ID NO: 1919 - protein, 9 aa, synthetic construct
HFDYSPAGL

SEQ ID NO: 1920 - protein, 8 aa, synthetic construct
HGLTVPLI

SEQ ID NO: 1921 - protein, 8 aa, synthetic construct
HGMIMLRI

SEQ ID NO: 1922 - protein, 9 aa, synthetic construct
HGPGEALAL

SEQ ID NO: 1923 - protein, 9 aa, synthetic construct
HGRLIFITV

SEQ ID NO: 1924 - protein, 9 aa, synthetic construct
HGTVVALRY

SEQ ID NO: 1925 - protein, 9 aa, synthetic construct
HIIAGAGEL

SEQ ID NO: 1926 - protein, 9 aa, synthetic construct
HIQDIVVHY

SEQ ID NO: 1927 - protein, 8 aa, synthetic construct
HLAPSALR

SEQ ID NO: 1928 - protein, 9 aa, synthetic construct
HLCSLKVHL

SEQ ID NO: 1929 - protein, 9 aa, synthetic construct
HLDATKLLL

SEQ ID NO: 1930 - protein, 9 aa, synthetic construct
HLDTLTEHY

SEQ ID NO: 1931 - protein, 11 aa, synthetic construct
HLEHSTIIYED

SEQ ID NO: 1932 - protein, 11 aa, synthetic construct
HLIPDASGKGV

SEQ ID NO: 1933 - protein, 9 aa, synthetic construct
HLLEEPIYL

SEQ ID NO: 1934 - protein, 8 aa, synthetic construct
HLLIELKN

SEQ ID NO: 1935 - protein, 9 aa, synthetic construct
HLLVHAPED

SEQ ID NO: 1936 - protein, 9 aa, synthetic construct
HLPDFVKQL

SEQ ID NO: 1937 - protein, 9 aa, synthetic construct
HLSIINEYL

SEQ ID NO: 1938 - protein, 9 aa, synthetic construct
HLVAVFNEY

SEQ ID NO: 1939 - protein, 8 aa, synthetic construct
HLVTHDAR

SEQ ID NO: 1940 - protein, 8 aa, synthetic construct
HMYIFKTL

SEQ ID NO: 1941 - protein, 9 aa, synthetic construct
HNPVFGVMS

SEQ ID NO: 1942 - protein, 9 aa, synthetic construct
HPAIALREY

SEQ ID NO: 1943 - protein, 11 aa, synthetic construct
HPCFWIDGQYL

SEQ ID NO: 1944 - protein, 9 aa, synthetic construct
HPDEPLYSF

SEQ ID NO: 1945 - protein, 10 aa, synthetic construct
HPDGVASVSF

SEQ ID NO: 1946 - protein, 10 aa, synthetic construct
HPFLYDRETY

SEQ ID NO: 1947 - protein, 10 aa, synthetic construct
HPFVFDIEDY

SEQ ID NO: 1948 - protein, 8 aa, synthetic construct
HPGLILKY

SEQ ID NO: 1949 - protein, 10 aa, synthetic construct
HPHQNLIATY

SEQ ID NO: 1950 - protein, 10 aa, synthetic construct
HPIEGLAVMY

SEQ ID NO: 1951 - protein, 10 aa, synthetic construct
HPIHQGITEL

SEQ ID NO: 1952 - protein, 10 aa, synthetic construct
HPIIPEQSTF

SEQ ID NO: 1953 - protein, 9 aa, synthetic construct
HPIPGEYKF

SEQ ID NO: 1954 - protein, 10 aa, synthetic construct
HPIQMYQVEF

SEQ ID NO: 1955 - protein, 9 aa, synthetic construct
HPIRIADGY

SEQ ID NO: 1956 - protein, 8 aa, synthetic construct
HPIVETLR

SEQ ID NO: 1957 - protein, 11 aa, synthetic construct
HPLSECEFQEY

SEQ ID NO: 1958 - protein, 9 aa, synthetic construct
HPMAYQLQL

SEQ ID NO: 1959 - protein, 10 aa, synthetic construct
HPNNVVSIKY

SEQ ID NO: 1960 - protein, 10 aa, synthetic construct
HPNSAIILHY

SEQ ID NO: 1961 - protein, 11 aa, synthetic construct
HPPTGLEFSMY

SEQ ID NO: 1962 - protein, 11 aa, synthetic construct
HPQYEVVEISF

SEQ ID NO: 1963 - protein, 9 aa, synthetic construct
HPSFHNINF

SEQ ID NO: 1964 - protein, 9 aa, synthetic construct
HPTAFVVSY

SEQ ID NO: 1965 - protein, 10 aa, synthetic construct
HPTCSFDITY

SEQ ID NO: 1966 - protein, 9 aa, synthetic construct
HPTDPLTSF

SEQ ID NO: 1967 - protein, 9 aa, synthetic construct
HPTIISESF

SEQ ID NO: 1968 - protein, 9 aa, synthetic construct
HPTVVISAY

SEQ ID NO: 1969 - protein, 10 aa, synthetic construct
HPVEELLDSY

SEQ ID NO: 1970 - protein, 9 aa, synthetic construct
HPVFQQESF

SEQ ID NO: 1971 - protein, 10 aa, synthetic construct
HPVLAQCDVF

SEQ ID NO: 1972 - protein, 10 aa, synthetic construct
HPVYILKGGY

SEQ ID NO: 1973 - protein, 9 aa, synthetic construct
HPWELFVKY

SEQ ID NO: 1974 - protein, 10 aa, synthetic construct
HPYSQALIQY

SEQ ID NO: 1975 - protein, 8 aa, synthetic construct
HQFRMLVV

SEQ ID NO: 1976 - protein, 8 aa, synthetic construct
HQITVLHV

SEQ ID NO: 1977 - protein, 8 aa, synthetic construct
HQLILSKL

SEQ ID NO: 1978 - protein, 9 aa, synthetic construct
HQRSFDIGI

SEQ ID NO: 1979 - protein, 8 aa, synthetic construct
HQYIFSHI

SEQ ID NO: 1980 - protein, 9 aa, synthetic construct
HQYIFSHIL

SEQ ID NO: 1981 - protein, 9 aa, synthetic construct
HQYPSWIFI

SEQ ID NO: 1982 - protein, 9 aa, synthetic construct
HRAPPIIGY

SEQ ID NO: 1983 - protein, 10 aa, synthetic construct
HRFEQAFYTY

SEQ ID NO: 1984 - protein, 11 aa, synthetic construct
HRFSDISSTTF

SEQ ID NO: 1985 - protein, 9 aa, synthetic construct
HRLPPVTSF

SEQ ID NO: 1986 - protein, 9 aa, synthetic construct
HRSLQLSLV

SEQ ID NO: 1987 - protein, 8 aa, synthetic construct
HSAGIFSM

SEQ ID NO: 1988 - protein, 9 aa, synthetic construct
HSAGIFSMY

SEQ ID NO: 1989 - protein, 10 aa, synthetic construct
HSDVTEAMLY

SEQ ID NO: 1990 - protein, 10 aa, synthetic construct
HSLILILGNP

SEQ ID NO: 1991 - protein, 9 aa, synthetic construct
HSRFIFNYV

SEQ ID NO: 1992 - protein, 8 aa, synthetic construct
HSTIMPRL

SEQ ID NO: 1993 - protein, 10 aa, synthetic construct
HSTWVTSEAY

SEQ ID NO: 1994 - protein, 9 aa, synthetic construct
HTADISSHF

SEQ ID NO: 1995 - protein, 9 aa, synthetic construct
HTATHILNF

SEQ ID NO: 1996 - protein, 11 aa, synthetic construct
HTQGPVDGSLY

SEQ ID NO: 1997 - protein, 11 aa, synthetic construct
HVEPLLARQLY

SEQ ID NO: 1998 - protein, 11 aa, synthetic construct
HVGDLGNVTAD

SEQ ID NO: 1999 - protein, 9 aa, synthetic construct
HVGPFIDSY

SEQ ID NO: 2000 - protein, 9 aa, synthetic construct
HVIETLIGK

SEQ ID NO: 2001 - protein, 11 aa, synthetic construct
HVLEAQDLIAK

SEQ ID NO: 2002 - protein, 11 aa, synthetic construct
HVPGADILNSY

SEQ ID NO: 2003 - protein, 9 aa, synthetic construct
HVSCVKLLL

SEQ ID NO: 2004 - protein, 9 aa, synthetic construct
HVYEIPVEY

SEQ ID NO: 2005 - protein, 10 aa, synthetic construct
HVYGFGLSNY

SEQ ID NO: 2006 - protein, 9 aa, synthetic construct
HWDPQEVTL

SEQ ID NO: 2007 - protein, 11 aa, synthetic construct
IAAACVAYYGA

SEQ ID NO: 2008 - protein, 9 aa, synthetic construct
IAAGIFNDL

SEQ ID NO: 2009 - protein, 9 aa, synthetic construct
IAALEQTAY

SEQ ID NO: 2010 - protein, 9 aa, synthetic construct
IAAPTSSAL

SEQ ID NO: 2011 - protein, 9 aa, synthetic construct
IAATIIYAY

SEQ ID NO: 2012 - protein, 9 aa, synthetic construct
IADDLSILY

SEQ ID NO: 2013 - protein, 9 aa, synthetic construct
IAFFCEEDY

SEQ ID NO: 2014 - protein, 9 aa, synthetic construct
IAFFDVRTF

SEQ ID NO: 2015 - protein, 10 aa, synthetic construct
IAFSNVFEHY

SEQ ID NO: 2016 - protein, 9 aa, synthetic construct
IAIDVIDAY

SEQ ID NO: 2017 - protein, 9 aa, synthetic construct
IAIGSQPVL

SEQ ID NO: 2018 - protein, 9 aa, synthetic construct
IAIPVTVAF

SEQ ID NO: 2019 - protein, 9 aa, synthetic construct
IAISLAQRY

SEQ ID NO: 2020 - protein, 9 aa, synthetic construct
IAISRTPVL

SEQ ID NO: 2021 - protein, 9 aa, synthetic construct
IALVHTDSY

SEQ ID NO: 2022 - protein, 9 aa, synthetic construct
IANQVQLFY

SEQ ID NO: 2023 - protein, 11 aa, synthetic construct
IAPGGGAFTTL

SEQ ID NO: 2024 - protein, 9 aa, synthetic construct
IAPGVTHEL

SEQ ID NO: 2025 - protein, 9 aa, synthetic construct
IAPNGALQL

SEQ ID NO: 2026 - protein, 9 aa, synthetic construct
IAPTGIESL

SEQ ID NO: 2027 - protein, 9 aa, synthetic construct
IAPTQVTEI

SEQ ID NO: 2028 - protein, 9 aa, synthetic construct
IAQEISEAF

SEQ ID NO: 2029 - protein, 9 aa, synthetic construct
IASAIVNEL

SEQ ID NO: 2030 - protein, 9 aa, synthetic construct
IAVALPVVY

SEQ ID NO: 2031 - protein, 9 aa, synthetic construct
IAVEITESF

SEQ ID NO: 2032 - protein, 9 aa, synthetic construct
IAVLHEERF

SEQ ID NO: 2033 - protein, 9 aa, synthetic construct
IAVLQAEVY

SEQ ID NO: 2034 - protein, 9 aa, synthetic construct
IAYKFGKTV

SEQ ID NO: 2035 - protein, 9 aa, synthetic construct
ICPFPSEAL

SEQ ID NO: 2036 - protein, 9 aa, synthetic construct
ICPGYNAVL

SEQ ID NO: 2037 - protein, 11 aa, synthetic construct
IDDPTDSKPED

SEQ ID NO: 2038 - protein, 8 aa, synthetic construct
IDHILDAL

SEQ ID NO: 2039 - protein, 9 aa, synthetic construct
IDNNIEQIS

SEQ ID NO: 2040 - protein, 10 aa, synthetic construct
IDNNIEQISS

SEQ ID NO: 2041 - protein, 11 aa, synthetic construct
IDNNIEQISSY

SEQ ID NO: 2042 - protein, 9 aa, synthetic construct
IDSTVGEHR

SEQ ID NO: 2043 - protein, 9 aa, synthetic construct
IEDDGLPSA

SEQ ID NO: 2044 - protein, 9 aa, synthetic construct
IEFEDYTQP

SEQ ID NO: 2045 - protein, 9 aa, synthetic construct
IEHISSLIK

SEQ ID NO: 2046 - protein, 10 aa, synthetic construct
IEHNLLSASK

SEQ ID NO: 2047 - protein, 9 aa, synthetic construct
IEIDSPYEI

SEQ ID NO: 2048 - protein, 10 aa, synthetic construct
IEIDYTGTEP

SEQ ID NO: 2049 - protein, 8 aa, synthetic construct
IEIITSSI

SEQ ID NO: 2050 - protein, 10 aa, synthetic construct
IEIQKAFAVA

SEQ ID NO: 2051 - protein, 8 aa, synthetic construct
IEKIMAQI

SEQ ID NO: 2052 - protein, 9 aa, synthetic construct
IELAYEQVA

SEQ ID NO: 2053 - protein, 8 aa, synthetic construct
IELPMDPK

SEQ ID NO: 2054 - protein, 9 aa, synthetic construct
IESPAVAAP

SEQ ID NO: 2055 - protein, 9 aa, synthetic construct
IESPPAFTA

SEQ ID NO: 2056 - protein, 9 aa, synthetic construct
IEVDSSPSV

SEQ ID NO: 2057 - protein, 10 aa, synthetic construct
IEVEKPFAIA

SEQ ID NO: 2058 - protein, 9 aa, synthetic construct
IEVENKEVL

SEQ ID NO: 2059 - protein, 9 aa, synthetic construct
IEVGICNEA

SEQ ID NO: 2060 - protein, 8 aa, synthetic construct
IEVLQPLI

SEQ ID NO: 2061 - protein, 9 aa, synthetic construct
IEYDDFVEC

SEQ ID NO: 2062 - protein, 8 aa, synthetic construct
IFDEIHYM

SEQ ID NO: 2063 - protein, 9 aa, synthetic construct
IFDGIIVSL

SEQ ID NO: 2064 - protein, 9 aa, synthetic construct
IFDGRVVAK

SEQ ID NO: 2065 - protein, 9 aa, synthetic construct
IFDPLEIIL

SEQ ID NO: 2066 - protein, 9 aa, synthetic construct
IFDPNILTI

SEQ ID NO: 2067 - protein, 11 aa, synthetic construct
IFDPQNPDENE

SEQ ID NO: 2068 - protein, 9 aa, synthetic construct
IFDPVKQQF

SEQ ID NO: 2069 - protein, 9 aa, synthetic construct
IFDRVLTEL

SEQ ID NO: 2070 - protein, 9 aa, synthetic construct
IFDSKVTEI

SEQ ID NO: 2071 - protein, 9 aa, synthetic construct
IFDSSDLSF

SEQ ID NO: 2072 - protein, 9 aa, synthetic construct
IFDVASIIL

SEQ ID NO: 2073 - protein, 9 aa, synthetic construct
IFFENHPYF

SEQ ID NO: 2074 - protein, 10 aa, synthetic construct
IFHTVTTTDD

SEQ ID NO: 2075 - protein, 10 aa, synthetic construct
IFIQNSKLYF

SEQ ID NO: 2076 - protein, 11 aa, synthetic construct
IFWAPESAPLK

SEQ ID NO: 2077 - protein, 11 aa, synthetic construct
IFYAGTGNLLL

SEQ ID NO: 2078 - protein, 10 aa, synthetic construct
IGENVSGLQR

SEQ ID NO: 2079 - protein, 11 aa, synthetic construct
IGGTNVGEDIR

SEQ ID NO: 2080 - protein, 9 aa, synthetic construct
IGIDLGTTY

SEQ ID NO: 2081 - protein, 9 aa, synthetic construct
IGLPSGAIL

SEQ ID NO: 2082 - protein, 11 aa, synthetic construct
IGSTYFERCLK

SEQ ID NO: 2083 - protein, 9 aa, synthetic construct
IGYKIKTLI

SEQ ID NO: 2084 - protein, 9 aa, synthetic construct
IGYPFLVSV

SEQ ID NO: 2085 - protein, 11 aa, synthetic construct
IHEMLQPGQDQ

SEQ ID NO: 2086 - protein, 10 aa, synthetic construct
IHPMAYQLQL

SEQ ID NO: 2087 - protein, 9 aa, synthetic construct
IIAIPTGVK

SEQ ID NO: 2088 - protein, 9 aa, synthetic construct
IIFDRPLLY

SEQ ID NO: 2089 - protein, 9 aa, synthetic construct
IIHAVIQEY

SEQ ID NO: 2090 - protein, 9 aa, synthetic construct
IINDLLQSL

SEQ ID NO: 2091 - protein, 9 aa, synthetic construct
IINGEATML

SEQ ID NO: 2092 - protein, 8 aa, synthetic construct
IINTFHQY

SEQ ID NO: 2093 - protein, 9 aa, synthetic construct
IIPQTISEL

SEQ ID NO: 2094 - protein, 9 aa, synthetic construct
IIPYITNVL

SEQ ID NO: 2095 - protein, 10 aa, synthetic construct
IISSESYSFK

SEQ ID NO: 2096 - protein, 9 aa, synthetic construct
IIYASMVSA

SEQ ID NO: 2097 - protein, 9 aa, synthetic construct
ILAFWVLPK

SEQ ID NO: 2098 - protein, 9 aa, synthetic construct
ILAIAGEDF

SEQ ID NO: 2099 - protein, 8 aa, synthetic construct
ILDDSVEM

SEQ ID NO: 2100 - protein, 8 aa, synthetic construct
ILDEAVEL

SEQ ID NO: 2101 - protein, 9 aa, synthetic construct
ILDGNQLHI

SEQ ID NO: 2102 - protein, 10 aa, synthetic construct
ILEEIGGGQK

SEQ ID NO: 2103 - protein, 9 aa, synthetic construct
ILEQEEYQR

SEQ ID NO: 2104 - protein, 11 aa, synthetic construct
ILEVLKEGSGL

SEQ ID NO: 2105 - protein, 11 aa, synthetic construct
ILFAHNDLVDK

SEQ ID NO: 2106 - protein, 9 aa, synthetic construct
ILIACGTSY

SEQ ID NO: 2107 - protein, 11 aa, synthetic construct
ILILGLDNAGK

SEQ ID NO: 2108 - protein, 9 aa, synthetic construct
ILLKDILSV

SEQ ID NO: 2109 - protein, 9 aa, synthetic construct
ILMIFSHQI

SEQ ID NO: 2110 - protein, 10 aa, synthetic construct
ILPDQTFTAL

SEQ ID NO: 2111 - protein, 9 aa, synthetic construct
ILPEQHMSL

SEQ ID NO: 2112 - protein, 10 aa, synthetic construct
ILPHVDIQLK

SEQ ID NO: 2113 - protein, 9 aa, synthetic construct
ILPISQESL

SEQ ID NO: 2114 - protein, 10 aa, synthetic construct
ILPPLSPYFK

SEQ ID NO: 2115 - protein, 9 aa, synthetic construct
ILSGVVTKM

SEQ ID NO: 2116 - protein, 9 aa, synthetic construct
ILTDITKGV

SEQ ID NO: 2117 - protein, 9 aa, synthetic construct
ILTETINTV

SEQ ID NO: 2118 - protein, 9 aa, synthetic construct
ILTVGGTAY

SEQ ID NO: 2119 - protein, 9 aa, synthetic construct
ILWETVPSM

SEQ ID NO: 2120 - protein, 9 aa, synthetic construct
ILYGKIIHL

SEQ ID NO: 2121 - protein, 9 aa, synthetic construct
ILYPKTLFL

SEQ ID NO: 2122 - protein, 9 aa, synthetic construct
IMDESVLGV

SEQ ID NO: 2123 - protein, 9 aa, synthetic construct
IMLEALERV

SEQ ID NO: 2124 - protein, 8 aa, synthetic construct
INDERVFV

SEQ ID NO: 2125 - protein, 9 aa, synthetic construct
INGLRQVLD

SEQ ID NO: 2126 - protein, 8 aa, synthetic construct
INIVHPKL

SEQ ID NO: 2127 - protein, 9 aa, synthetic construct
IPAAILHAF

SEQ ID NO: 2128 - protein, 9 aa, synthetic construct
IPAAVKLTY

SEQ ID NO: 2129 - protein, 9 aa, synthetic construct
IPADMVSVL

SEQ ID NO: 2130 - protein, 9 aa, synthetic construct
IPAEADFLL

SEQ ID NO: 2131 - protein, 9 aa, synthetic construct
IPAEFSGVW

SEQ ID NO: 2132 - protein, 9 aa, synthetic construct
IPAFTCEEY

SEQ ID NO: 2133 - protein, 9 aa, synthetic construct
IPAKPPVSF

SEQ ID NO: 2134 - protein, 8 aa, synthetic construct
IPALAVEM

SEQ ID NO: 2135 - protein, 10 aa, synthetic construct
IPANPALLTY

SEQ ID NO: 2136 - protein, 10 aa, synthetic construct
IPAPGSGVSF

SEQ ID NO: 2137 - protein, 9 aa, synthetic construct
IPATITERY

SEQ ID NO: 2138 - protein, 9 aa, synthetic construct
IPCGITNAL

SEQ ID NO: 2139 - protein, 9 aa, synthetic construct
IPDAMDIVL

SEQ ID NO: 2140 - protein, 9 aa, synthetic construct
IPDASKLQF

SEQ ID NO: 2141 - protein, 9 aa, synthetic construct
IPDKFVVGY

SEQ ID NO: 2142 - protein, 9 aa, synthetic construct
IPDNSQLEY

SEQ ID NO: 2143 - protein, 11 aa, synthetic construct
IPDPEAVKPDD

SEQ ID NO: 2144 - protein, 9 aa, synthetic construct
IPDSHIVLM

SEQ ID NO: 2145 - protein, 9 aa, synthetic construct
IPDSVSIQY

SEQ ID NO: 2146 - protein, 9 aa, synthetic construct
IPEELEFQY

SEQ ID NO: 2147 - protein, 9 aa, synthetic construct
IPEESQLVF

SEQ ID NO: 2148 - protein, 9 aa, synthetic construct
IPEGTILTM

SEQ ID NO: 2149 - protein, 9 aa, synthetic construct
IPEPIDPLF

SEQ ID NO: 2150 - protein, 9 aa, synthetic construct
IPFAAPTAL

SEQ ID NO: 2151 - protein, 9 aa, synthetic construct
IPFGDWFEY

SEQ ID NO: 2152 - protein, 11 aa, synthetic construct
IPFGITEEAMM

SEQ ID NO: 2153 - protein, 8 aa, synthetic construct
IPFLPLEY

SEQ ID NO: 2154 - protein, 10 aa, synthetic construct
IPFPNVLPDF

SEQ ID NO: 2155 - protein, 8 aa, synthetic construct
IPGLATAY

SEQ ID NO: 2156 - protein, 10 aa, synthetic construct
IPGTPISVAY

SEQ ID NO: 2157 - protein, 9 aa, synthetic construct
IPHILKEMY

SEQ ID NO: 2158 - protein, 11 aa, synthetic construct
IPHTDPVDYEF

SEQ ID NO: 2159 - protein, 11 aa, synthetic construct
IPIALSGRDIL

SEQ ID NO: 2160 - protein, 9 aa, synthetic construct
IPIDSTVSF

SEQ ID NO: 2161 - protein, 9 aa, synthetic construct
IPIEGATEW

SEQ ID NO: 2162 - protein, 9 aa, synthetic construct
IPIEPDYKF

SEQ ID NO: 2163 - protein, 10 aa, synthetic construct
IPIERLYVTY

SEQ ID NO: 2164 - protein, 9 aa, synthetic construct
IPIFTDVAL

SEQ ID NO: 2165 - protein, 11 aa, synthetic construct
IPIGGGTSVSY

SEQ ID NO: 2166 - protein, 9 aa, synthetic construct
IPILIIEGF

SEQ ID NO: 2167 - protein, 9 aa, synthetic construct
IPISLHTSL

SEQ ID NO: 2168 - protein, 9 aa, synthetic construct
IPITETEAY

SEQ ID NO: 2169 - protein, 10 aa, synthetic construct
IPIYADKDVF

SEQ ID NO: 2170 - protein, 11 aa, synthetic construct
IPLALEGKDLL

SEQ ID NO: 2171 - protein, 10 aa, synthetic construct
IPLDDPTLLF

SEQ ID NO: 2172 - protein, 10 aa, synthetic construct
IPLPHGTHTF

SEQ ID NO: 2173 - protein, 9 aa, synthetic construct
IPLRSSWVM

SEQ ID NO: 2174 - protein, 10 aa, synthetic construct
IPLSATSVSY

SEQ ID NO: 2175 - protein, 9 aa, synthetic construct
IPLSSIPTY

SEQ ID NO: 2176 - protein, 10 aa, synthetic construct
IPMPGHPVNF

SEQ ID NO: 2177 - protein, 9 aa, synthetic construct
IPMQSEPQY

SEQ ID NO: 2178 - protein, 9 aa, synthetic construct
IPMTPTSSF

SEQ ID NO: 2179 - protein, 9 aa, synthetic construct
IPNEIIHAL

SEQ ID NO: 2180 - protein, 10 aa, synthetic construct
IPRGVNVSAL

SEQ ID NO: 2181 - protein, 9 aa, synthetic construct
IPRYGFTAL

SEQ ID NO: 2182 - protein, 9 aa, synthetic construct
IPRYIISQL

SEQ ID NO: 2183 - protein, 10 aa, synthetic construct
IPSATNVTCY

SEQ ID NO: 2184 - protein, 9 aa, synthetic construct
IPSELFSSF

SEQ ID NO: 2185 - protein, 8 aa, synthetic construct
IPTFTALL

SEQ ID NO: 2186 - protein, 11 aa, synthetic construct
IPVDISDSDMM

SEQ ID NO: 2187 - protein, 9 aa, synthetic construct
IPVDTVLTM

SEQ ID NO: 2188 - protein, 9 aa, synthetic construct
IPVEEPLPF

SEQ ID NO: 2189 - protein, 10 aa, synthetic construct
IPVEQKEGAF

SEQ ID NO: 2190 - protein, 8 aa, synthetic construct
IPVICVTY

SEQ ID NO: 2191 - protein, 9 aa, synthetic construct
IPVIVTEQY

SEQ ID NO: 2192 - protein, 11 aa, synthetic construct
IPVNEKDTLTY

SEQ ID NO: 2193 - protein, 9 aa, synthetic construct
IPVNSIPTY

SEQ ID NO: 2194 - protein, 9 aa, synthetic construct
IPVPINAEL

SEQ ID NO: 2195 - protein, 9 aa, synthetic construct
IPWKHIDYF

SEQ ID NO: 2196 - protein, 9 aa, synthetic construct
IPWVIEPVY

SEQ ID NO: 2197 - protein, 9 aa, synthetic construct
IPYGERITL

SEQ ID NO: 2198 - protein, 11 aa, synthetic construct
IPYHSEVPVSL

SEQ ID NO: 2199 - protein, 11 aa, synthetic construct
IPYSEPMPLSF

SEQ ID NO: 2200 - protein, 9 aa, synthetic construct
IPYTSVPTY

SEQ ID NO: 2201 - protein, 9 aa, synthetic construct
IQAPLSWEL

SEQ ID NO: 2202 - protein, 9 aa, synthetic construct
IQDKCVPLV

SEQ ID NO: 2203 - protein, 10 aa, synthetic construct
IQEVPELVGH

SEQ ID NO: 2204 - protein, 8 aa, synthetic construct
IQFPIQKI

SEQ ID NO: 2205 - protein, 11 aa, synthetic construct
IQFRLPDGSSF

SEQ ID NO: 2206 - protein, 8 aa, synthetic construct
IQKELLDY

SEQ ID NO: 2207 - protein, 9 aa, synthetic construct
IQKRFGLNI

SEQ ID NO: 2208 - protein, 9 aa, synthetic construct
IQLEGRPSI

SEQ ID NO: 2209 - protein, 8 aa, synthetic construct
IQLELDTV

SEQ ID NO: 2210 - protein, 8 aa, synthetic construct
IQMSVQRI

SEQ ID NO: 2211 - protein, 9 aa, synthetic construct
IQRIFLITL

SEQ ID NO: 2212 - protein, 8 aa, synthetic construct
IQSVMTEI

SEQ ID NO: 2213 - protein, 11 aa, synthetic construct
IQVDIGGGQTK

SEQ ID NO: 2214 - protein, 8 aa, synthetic construct
IQYALRTL

SEQ ID NO: 2215 - protein, 8 aa, synthetic construct
IQYEIKQI

SEQ ID NO: 2216 - protein, 9 aa, synthetic construct
IRAEPLNSV

SEQ ID NO: 2217 - protein, 9 aa, synthetic construct
IRCFVSHPF

SEQ ID NO: 2218 - protein, 8 aa, synthetic construct
IRCKAVHV

SEQ ID NO: 2219 - protein, 10 aa, synthetic construct
IRFGLLPLSM

SEQ ID NO: 2220 - protein, 9 aa, synthetic construct
IRFPDILRV

SEQ ID NO: 2221 - protein, 9 aa, synthetic construct
IRHPNIITL

SEQ ID NO: 2222 - protein, 8 aa, synthetic construct
IRIPAVIK

SEQ ID NO: 2223 - protein, 9 aa, synthetic construct
IRKPYIWEY

SEQ ID NO: 2224 - protein, 9 aa, synthetic construct
IRPENVIIY

SEQ ID NO: 2225 - protein, 9 aa, synthetic construct
IRPGTAFEL

SEQ ID NO: 2226 - protein, 9 aa, synthetic construct
IRTVIQIHM

SEQ ID NO: 2227 - protein, 9 aa, synthetic construct
IRYEGILYT

SEQ ID NO: 2228 - protein, 9 aa, synthetic construct
IRYPDPLIK

SEQ ID NO: 2229 - protein, 8 aa, synthetic construct
ISALVDGK

SEQ ID NO: 2230 - protein, 11 aa, synthetic construct
ISDPTSPLRTR

SEQ ID NO: 2231 - protein, 9 aa, synthetic construct
ISFGAFVAK

SEQ ID NO: 2232 - protein, 8 aa, synthetic construct
ISLATGHR

SEQ ID NO: 2233 - protein, 11 aa, synthetic construct
ISLGLSTFMID

SEQ ID NO: 2234 - protein, 9 aa, synthetic construct
ISPETMVAL

SEQ ID NO: 2235 - protein, 8 aa, synthetic construct
ISQHLVSY

SEQ ID NO: 2236 - protein, 9 aa, synthetic construct
ISSDTFITY

SEQ ID NO: 2237 - protein, 9 aa, synthetic construct
ISSPVVTSL

SEQ ID NO: 2238 - protein, 9 aa, synthetic construct
ISYDRTLVI

SEQ ID NO: 2239 - protein, 9 aa, synthetic construct
ITDAYLDQY

SEQ ID NO: 2240 - protein, 9 aa, synthetic construct
ITDHGSLIY

SEQ ID NO: 2241 - protein, 10 aa, synthetic construct
ITDPDPDIRY

SEQ ID NO: 2242 - protein, 9 aa, synthetic construct
ITDPEVVFV

SEQ ID NO: 2243 - protein, 9 aa, synthetic construct
ITDPSVIVM

SEQ ID NO: 2244 - protein, 10 aa, synthetic construct
ITDSAGHILY

SEQ ID NO: 2245 - protein, 9 aa, synthetic construct
ITPGGFSSV

SEQ ID NO: 2246 - protein, 9 aa, synthetic construct
ITPSTQQHL

SEQ ID NO: 2247 - protein, 9 aa, synthetic construct
ITTDVNPYY

SEQ ID NO: 2248 - protein, 9 aa, synthetic construct
ITTKAISRW

SEQ ID NO: 2249 - protein, 9 aa, synthetic construct
ITVEHLAIK

SEQ ID NO: 2250 - protein, 9 aa, synthetic construct
ITVGDIGPK

SEQ ID NO: 2251 - protein, 11 aa, synthetic construct
ITWVMLEAGAE

SEQ ID NO: 2252 - protein, 9 aa, synthetic construct
IVDHIHFQY

SEQ ID NO: 2253 - protein, 9 aa, synthetic construct
IVDHTIIMY

SEQ ID NO: 2254 - protein, 8 aa, synthetic construct
IVDPVSNL

SEQ ID NO: 2255 - protein, 10 aa, synthetic construct
IVDPVSNLRL

SEQ ID NO: 2256 - protein, 9 aa, synthetic construct
IVDTPEVVL

SEQ ID NO: 2257 - protein, 9 aa, synthetic construct
IVGPDGLVY

SEQ ID NO: 2258 - protein, 11 aa, synthetic construct
IVGSEHYDVAR

SEQ ID NO: 2259 - protein, 9 aa, synthetic construct
IVPPTFSAL

SEQ ID NO: 2260 - protein, 8 aa, synthetic construct
IVPVGEAL

SEQ ID NO: 2261 - protein, 9 aa, synthetic construct
IVSQIAVAY

SEQ ID NO: 2262 - protein, 9 aa, synthetic construct
IVTATQSNI

SEQ ID NO: 2263 - protein, 9 aa, synthetic construct
IVTSILEEY

SEQ ID NO: 2264 - protein, 8 aa, synthetic construct
IVTWFMLL

SEQ ID NO: 2265 - protein, 11 aa, synthetic construct
IVVIGHVDSGK

SEQ ID NO: 2266 - protein, 9 aa, synthetic construct
IWDLSITRL

SEQ ID NO: 2267 - protein, 9 aa, synthetic construct
IWEPLAVKL

SEQ ID NO: 2268 - protein, 9 aa, synthetic construct
IYANTINTF

SEQ ID NO: 2269 - protein, 9 aa, synthetic construct
IYDKFIAQL

SEQ ID NO: 2270 - protein, 9 aa, synthetic construct
IYDLVDRHL

SEQ ID NO: 2271 - protein, 9 aa, synthetic construct
IYDNAVQGL

SEQ ID NO: 2272 - protein, 9 aa, synthetic construct
IYDNQGIEL

SEQ ID NO: 2273 - protein, 9 aa, synthetic construct
IYDPNLAFL

SEQ ID NO: 2274 - protein, 11 aa, synthetic construct
IYDPNLAFLRF

SEQ ID NO: 2275 - protein, 9 aa, synthetic construct
IYDVQHANL

SEQ ID NO: 2276 - protein, 9 aa, synthetic construct
IYDYAIVLF

SEQ ID NO: 2277 - protein, 10 aa, synthetic construct
IYLIPDIDLK

SEQ ID NO: 2278 - protein, 9 aa, synthetic construct
IYPDSFTVL

SEQ ID NO: 2279 - protein, 9 aa, synthetic construct
IYWDGPLAL

SEQ ID NO: 2280 - protein, 11 aa, synthetic construct
KADLEMQIESL

SEQ ID NO: 2281 - protein, 9 aa, synthetic construct
KAFQKIVVL

SEQ ID NO: 2282 - protein, 9 aa, synthetic construct
KAPVTVTSL

SEQ ID NO: 2283 - protein, 11 aa, synthetic construct
KASGRALAAKI

SEQ ID NO: 2284 - protein, 9 aa, synthetic construct
KATNVVRLL

SEQ ID NO: 2285 - protein, 9 aa, synthetic construct
KDWDDDQND

SEQ ID NO: 2286 - protein, 9 aa, synthetic construct
KEFEFSQLP

SEQ ID NO: 2287 - protein, 9 aa, synthetic construct
KEFPGFLEN

SEQ ID NO: 2288 - protein, 9 aa, synthetic construct
KEFPGLAGV

SEQ ID NO: 2289 - protein, 9 aa, synthetic construct
KEFQLFQGV

SEQ ID NO: 2290 - protein, 9 aa, synthetic construct
KEFSPFGSI

SEQ ID NO: 2291 - protein, 9 aa, synthetic construct
KEFSPFGTI

SEQ ID NO: 2292 - protein, 10 aa, synthetic construct
KEFSQSFDAA

SEQ ID NO: 2293 - protein, 9 aa, synthetic construct
KEHLYFETV

SEQ ID NO: 2294 - protein, 11 aa, synthetic construct
KEIENTYANVA

SEQ ID NO: 2295 - protein, 10 aa, synthetic construct
KEINERLLTA

SEQ ID NO: 2296 - protein, 10 aa, synthetic construct
KEIQGFFNIP

SEQ ID NO: 2297 - protein, 10 aa, synthetic construct
KELAARIVVA

SEQ ID NO: 2298 - protein, 11 aa, synthetic construct
KELLQMDLYAL

SEQ ID NO: 2299 - protein, 10 aa, synthetic construct
KEMEAFLVSV

SEQ ID NO: 2300 - protein, 8 aa, synthetic construct
KESLPLFK

SEQ ID NO: 2301 - protein, 9 aa, synthetic construct
KESSTVFEL

SEQ ID NO: 2302 - protein, 10 aa, synthetic construct
KETPFELIEA

SEQ ID NO: 2303 - protein, 9 aa, synthetic construct
KEWDEFQKA

SEQ ID NO: 2304 - protein, 10 aa, synthetic construct
KEYAAFVLGA

SEQ ID NO: 2305 - protein, 9 aa, synthetic construct
KEYEIFRVS

SEQ ID NO: 2306 - protein, 9 aa, synthetic construct
KFDDIRIYF

SEQ ID NO: 2307 - protein, 9 aa, synthetic construct
KFIDKQLEL

SEQ ID NO: 2308 - protein, 10 aa, synthetic construct
KFLDPITGTF

SEQ ID NO: 2309 - protein, 10 aa, synthetic construct
KFLPFKVVEK

SEQ ID NO: 2310 - protein, 10 aa, synthetic construct
KFLSQLEITF

SEQ ID NO: 2311 - protein, 10 aa, synthetic construct
KFLTITPIVL

SEQ ID NO: 2312 - protein, 9 aa, synthetic construct
KFVDILTNW

SEQ ID NO: 2313 - protein, 9 aa, synthetic construct
KIADRFLLY

SEQ ID NO: 2314 - protein, 9 aa, synthetic construct
KIGSIIFQV

SEQ ID NO: 2315 - protein, 9 aa, synthetic construct
KIKSFEVVF

SEQ ID NO: 2316 - protein, 9 aa, synthetic construct
KIRNFVVVF

SEQ ID NO: 2317 - protein, 9 aa, synthetic construct
KLCGYVIFR

SEQ ID NO: 2318 - protein, 11 aa, synthetic construct
KLDYGQHVVAG

SEQ ID NO: 2319 - protein, 10 aa, synthetic construct
KLFDHAVSKF

SEQ ID NO: 2320 - protein, 9 aa, synthetic construct
KLFIGGLNV

SEQ ID NO: 2321 - protein, 9 aa, synthetic construct
KLHGVNINV

SEQ ID NO: 2322 - protein, 11 aa, synthetic construct
KLISEEDLLRK

SEQ ID NO: 2323 - protein, 10 aa, synthetic construct
KLLEEQGIFL

SEQ ID NO: 2324 - protein, 11 aa, synthetic construct
KLLEPVLLLGK

SEQ ID NO: 2325 - protein, 10 aa, synthetic construct
KLLNYAPLEK

SEQ ID NO: 2326 - protein, 8 aa, synthetic construct
KLLSEVPV

SEQ ID NO: 2327 - protein, 9 aa, synthetic construct
KLMAMFLEY

SEQ ID NO: 2328 - protein, 9 aa, synthetic construct
KLMDHIYAV

SEQ ID NO: 2329 - protein, 9 aa, synthetic construct
KLMELLEEI

SEQ ID NO: 2330 - protein, 9 aa, synthetic construct
KLMENILLY

SEQ ID NO: 2331 - protein, 9 aa, synthetic construct
KLMPVIMII

SEQ ID NO: 2332 - protein, 9 aa, synthetic construct
KLPDGFSQL

SEQ ID NO: 2333 - protein, 10 aa, synthetic construct
KLPEYNPRTL

SEQ ID NO: 2334 - protein, 9 aa, synthetic construct
KLPGPGSSL

SEQ ID NO: 2335 - protein, 10 aa, synthetic construct
KLREPNFTLK

SEQ ID NO: 2336 - protein, 9 aa, synthetic construct
KMMDVTVTI

SEQ ID NO: 2337 - protein, 10 aa, synthetic construct
KMMDVTVTIK

SEQ ID NO: 2338 - protein, 8 aa, synthetic construct
KNELFSNL

SEQ ID NO: 2339 - protein, 11 aa, synthetic construct
KPFNPLLGETY

SEQ ID NO: 2340 - protein, 9 aa, synthetic construct
KQFPEVIKY

SEQ ID NO: 2341 - protein, 8 aa, synthetic construct
KQIIKPFI

SEQ ID NO: 2342 - protein, 8 aa, synthetic construct
KQLSILKV

SEQ ID NO: 2343 - protein, 9 aa, synthetic construct
KQLTWFYTF

SEQ ID NO: 2344 - protein, 9 aa, synthetic construct
KRFDDKYTL

SEQ ID NO: 2345 - protein, 11 aa, synthetic construct
KRFDDKYTLKL

SEQ ID NO: 2346 - protein, 9 aa, synthetic construct
KRFDMAVMF

SEQ ID NO: 2347 - protein, 9 aa, synthetic construct
KRFQVAVNL

SEQ ID NO: 2348 - protein, 9 aa, synthetic construct
KRILVLVSH

SEQ ID NO: 2349 - protein, 9 aa, synthetic construct
KRLCEIFTR

SEQ ID NO: 2350 - protein, 10 aa, synthetic construct
KRLDINTNTY

SEQ ID NO: 2351 - protein, 10 aa, synthetic construct
KRLDVTVQSF

SEQ ID NO: 2352 - protein, 9 aa, synthetic construct
KRQEAIFEL

SEQ ID NO: 2353 - protein, 9 aa, synthetic construct
KRTLIAEGY

SEQ ID NO: 2354 - protein, 10 aa, synthetic construct
KRVYLGALKY

SEQ ID NO: 2355 - protein, 9 aa, synthetic construct
KSDLFFHDY

SEQ ID NO: 2356 - protein, 10 aa, synthetic construct
KSLPGQNEDL

SEQ ID NO: 2357 - protein, 9 aa, synthetic construct
KSPGFGLSL

SEQ ID NO: 2358 - protein, 9 aa, synthetic construct
KSTAISLFY

SEQ ID NO: 2359 - protein, 9 aa, synthetic construct
KSVDWLLVF

SEQ ID NO: 2360 - protein, 10 aa, synthetic construct
KTAKLILERF

SEQ ID NO: 2361 - protein, 9 aa, synthetic construct
KTRIIDVVY

SEQ ID NO: 2362 - protein, 10 aa, synthetic construct
KTYGEIFEKF

SEQ ID NO: 2363 - protein, 9 aa, synthetic construct
KVANIILSY

SEQ ID NO: 2364 - protein, 10 aa, synthetic construct
KVCNPIITKL

SEQ ID NO: 2365 - protein, 10 aa, synthetic construct
KVTEGSFVYK

SEQ ID NO: 2366 - protein, 9 aa, synthetic construct
KVVDVVRNL

SEQ ID NO: 2367 - protein, 9 aa, synthetic construct
KYCQVIRVI

SEQ ID NO: 2368 - protein, 10 aa, synthetic construct
KYDPEEPIYF

SEQ ID NO: 2369 - protein, 9 aa, synthetic construct
KYEELFPAF

SEQ ID NO: 2370 - protein, 9 aa, synthetic construct
KYFDEHYEY

SEQ ID NO: 2371 - protein, 9 aa, synthetic construct
KYFLWEEKF

SEQ ID NO: 2372 - protein, 11 aa, synthetic construct
KYITQGQLLQF

SEQ ID NO: 2373 - protein, 11 aa, synthetic construct
KYLAILGSVTF

SEQ ID NO: 2374 - protein, 10 aa, synthetic construct
KYLTEGLLQF

SEQ ID NO: 2375 - protein, 9 aa, synthetic construct
KYMDVQFDF

SEQ ID NO: 2376 - protein, 9 aa, synthetic construct
KYPDRVPVI

SEQ ID NO: 2377 - protein, 9 aa, synthetic construct
KYVSGEFRF

SEQ ID NO: 2378 - protein, 9 aa, synthetic construct
KYVYVVTEL

SEQ ID NO: 2379 - protein, 10 aa, synthetic construct
LAAAGYDVEK

SEQ ID NO: 2380 - protein, 10 aa, synthetic construct
LAAGGYDVEK

SEQ ID NO: 2381 - protein, 9 aa, synthetic construct
LAAITYTAY

SEQ ID NO: 2382 - protein, 9 aa, synthetic construct
LAAPVISVL

SEQ ID NO: 2383 - protein, 9 aa, synthetic construct
LADEVITVF

SEQ ID NO: 2384 - protein, 8 aa, synthetic construct
LAEGTAIK

SEQ ID NO: 2385 - protein, 8 aa, synthetic construct
LAELTGIK

SEQ ID NO: 2386 - protein, 11 aa, synthetic construct
LAETEGRYCVQ

SEQ ID NO: 2387 - protein, 9 aa, synthetic construct
LAFPTGCSL

SEQ ID NO: 2388 - protein, 8 aa, synthetic construct
LAGLFRAL

SEQ ID NO: 2389 - protein, 8 aa, synthetic construct
LAHLEEER

SEQ ID NO: 2390 - protein, 11 aa, synthetic construct
LAHPFFQDVTK

SEQ ID NO: 2391 - protein, 9 aa, synthetic construct
LAIESANEL

SEQ ID NO: 2392 - protein, 9 aa, synthetic construct
LALATSAAL

SEQ ID NO: 2393 - protein, 11 aa, synthetic construct
LALDASQHSSL

SEQ ID NO: 2394 - protein, 9 aa, synthetic construct
LALEVVNTY

SEQ ID NO: 2395 - protein, 10 aa, synthetic construct
LALYNQGHIK

SEQ ID NO: 2396 - protein, 9 aa, synthetic construct
LANKLITVY

SEQ ID NO: 2397 - protein, 9 aa, synthetic construct
LAPASVQTL

SEQ ID NO: 2398 - protein, 9 aa, synthetic construct
LAPNIISQL

SEQ ID NO: 2399 - protein, 9 aa, synthetic construct
LAPSASVVL

SEQ ID NO: 2400 - protein, 9 aa, synthetic construct
LAPSSGLSV

SEQ ID NO: 2401 - protein, 9 aa, synthetic construct
LAPVRQQEL

SEQ ID NO: 2402 - protein, 9 aa, synthetic construct
LASLLFEEY

SEQ ID NO: 2403 - protein, 9 aa, synthetic construct
LATDFIQSL

SEQ ID NO: 2404 - protein, 9 aa, synthetic construct
LATRAIPEL

SEQ ID NO: 2405 - protein, 10 aa, synthetic construct
LAVHPSGVAL

SEQ ID NO: 2406 - protein, 10 aa, synthetic construct
LAVIGGIDGR

SEQ ID NO: 2407 - protein, 9 aa, synthetic construct
LCFTPLVAK

SEQ ID NO: 2408 - protein, 11 aa, synthetic construct
LDDNLRPDRKL

SEQ ID NO: 2409 - protein, 8 aa, synthetic construct
LDDQGLTK

SEQ ID NO: 2410 - protein, 8 aa, synthetic construct
LDEGHAIR

SEQ ID NO: 2411 - protein, 8 aa, synthetic construct
LDIIETNV

SEQ ID NO: 2412 - protein, 10 aa, synthetic construct
LDIKIRLENE

SEQ ID NO: 2413 - protein, 9 aa, synthetic construct
LDLDNPELE

SEQ ID NO: 2414 - protein, 10 aa, synthetic construct
LDLISESPIK

SEQ ID NO: 2415 - protein, 11 aa, synthetic construct
LDTNADKQLSF

SEQ ID NO: 2416 - protein, 9 aa, synthetic construct
LEAQAATGF

SEQ ID NO: 2417 - protein, 8 aa, synthetic construct
LEAQSHFR

SEQ ID NO: 2418 - protein, 8 aa, synthetic construct
LEAVILPK

SEQ ID NO: 2419 - protein, 9 aa, synthetic construct
LEEIGGGQK

SEQ ID NO: 2420 - protein, 11 aa, synthetic construct
LEEQLQQIRAE

SEQ ID NO: 2421 - protein, 10 aa, synthetic construct
LEETEIKLQA

SEQ ID NO: 2422 - protein, 10 aa, synthetic construct
LEFEGGEVSL

SEQ ID NO: 2423 - protein, 10 aa, synthetic construct
LEFLNRFEEA

SEQ ID NO: 2424 - protein, 9 aa, synthetic construct
LEFVILHQP

SEQ ID NO: 2425 - protein, 9 aa, synthetic construct
LEHLSGAGK

SEQ ID NO: 2426 - protein, 9 aa, synthetic construct
LEHPFVSSI

SEQ ID NO: 2427 - protein, 8 aa, synthetic construct
LEHPVLHV

SEQ ID NO: 2428 - protein, 9 aa, synthetic construct
LEIFDGNVA

SEQ ID NO: 2429 - protein, 9 aa, synthetic construct
LEIFQNEVA

SEQ ID NO: 2430 - protein, 9 aa, synthetic construct
LEIHSTPGP

SEQ ID NO: 2431 - protein, 11 aa, synthetic construct
LEINFGDLGRP

SEQ ID NO: 2432 - protein, 9 aa, synthetic construct
LEINRKLQA

SEQ ID NO: 2433 - protein, 9 aa, synthetic construct
LEIVPFRVA

SEQ ID NO: 2434 - protein, 11 aa, synthetic construct
LELFSELAEDK

SEQ ID NO: 2435 - protein, 9 aa, synthetic construct
LELGQPAAA

SEQ ID NO: 2436 - protein, 9 aa, synthetic construct
LELPGQPVA

SEQ ID NO: 2437 - protein, 9 aa, synthetic construct
LELPHLTSA

SEQ ID NO: 2438 - protein, 10 aa, synthetic construct
LELQQHLVSA

SEQ ID NO: 2439 - protein, 10 aa, synthetic construct
LEMDLKDLEA

SEQ ID NO: 2440 - protein, 8 aa, synthetic construct
LENEIQTY

SEQ ID NO: 2441 - protein, 8 aa, synthetic construct
LENVLAEK

SEQ ID NO: 2442 - protein, 8 aa, synthetic construct
LESDLEEK

SEQ ID NO: 2443 - protein, 9 aa, synthetic construct
LESDPQQVV

SEQ ID NO: 2444 - protein, 8 aa, synthetic construct
LETHLPSK

SEQ ID NO: 2445 - protein, 10 aa, synthetic construct
LETTALFVAA

SEQ ID NO: 2446 - protein, 11 aa, synthetic construct
LEVDGQKVEVP

SEQ ID NO: 2447 - protein, 9 aa, synthetic construct
LEVDPPVAA

SEQ ID NO: 2448 - protein, 9 aa, synthetic construct
LEVERQIVA

SEQ ID NO: 2449 - protein, 8 aa, synthetic construct
LEYRVTQV

SEQ ID NO: 2450 - protein, 9 aa, synthetic construct
LFDDCTQQF

SEQ ID NO: 2451 - protein, 9 aa, synthetic construct
LFDDIDHNM

SEQ ID NO: 2452 - protein, 9 aa, synthetic construct
LFDDKAVEI

SEQ ID NO: 2453 - protein, 9 aa, synthetic construct
LFDHAVSKF

SEQ ID NO: 2454 - protein, 9 aa, synthetic construct
LFDITGQDF

SEQ ID NO: 2455 - protein, 9 aa, synthetic construct
LFDLGGQYL

SEQ ID NO: 2456 - protein, 8 aa, synthetic construct
LFDSVIHL

SEQ ID NO: 2457 - protein, 9 aa, synthetic construct
LFEISTAEM

SEQ ID NO: 2458 - protein, 9 aa, synthetic construct
LFLERIISL

SEQ ID NO: 2459 - protein, 9 aa, synthetic construct
LFMPRSTEF

SEQ ID NO: 2460 - protein, 8 aa, synthetic construct
LFSDVQFK

SEQ ID NO: 2461 - protein, 10 aa, synthetic construct
LFSHLDDNER

SEQ ID NO: 2462 - protein, 8 aa, synthetic construct
LGADISMY

SEQ ID NO: 2463 - protein, 11 aa, synthetic construct
LGAQALLGAAK

SEQ ID NO: 2464 - protein, 9 aa, synthetic construct
LGASVVMAI

SEQ ID NO: 2465 - protein, 10 aa, synthetic construct
LGAVVTAIDI

SEQ ID NO: 2466 - protein, 8 aa, synthetic construct
LGDIATDY

SEQ ID NO: 2467 - protein, 8 aa, synthetic construct
LGDSLVLK

SEQ ID NO: 2468 - protein, 10 aa, synthetic construct
LGEDIVITAH

SEQ ID NO: 2469 - protein, 11 aa, synthetic construct
LGKSSLRNVVL

SEQ ID NO: 2470 - protein, 11 aa, synthetic construct
LGPGPGPTTPL

SEQ ID NO: 2471 - protein, 8 aa, synthetic construct
LGQLEQML

SEQ ID NO: 2472 - protein, 9 aa, synthetic construct
LGVHLVNSL

SEQ ID NO: 2473 - protein, 10 aa, synthetic construct
LGWSQTPDLK

SEQ ID NO: 2474 - protein, 9 aa, synthetic construct
LHPSPEEEK

SEQ ID NO: 2475 - protein, 8 aa, synthetic construct
LHTYHDSR

SEQ ID NO: 2476 - protein, 10 aa, synthetic construct
LIESESLSSL

SEQ ID NO: 2477 - protein, 8 aa, synthetic construct
LIGALLRD

SEQ ID NO: 2478 - protein, 8 aa, synthetic construct
LIGGKPDR

SEQ ID NO: 2479 - protein, 8 aa, synthetic construct
LIHLEERL

SEQ ID NO: 2480 - protein, 9 aa, synthetic construct
LIHVPLETF

SEQ ID NO: 2481 - protein, 9 aa, synthetic construct
LIIPFTLLT

SEQ ID NO: 2482 - protein, 9 aa, synthetic construct
LISLATGHR

SEQ ID NO: 2483 - protein, 10 aa, synthetic construct
LIYVAGGLTK

SEQ ID NO: 2484 - protein, 8 aa, synthetic construct
LKETETAL

SEQ ID NO: 2485 - protein, 11 aa, synthetic construct
LKNQILNLTTD

SEQ ID NO: 2486 - protein, 9 aa, synthetic construct
LLAEQGYEV

SEQ ID NO: 2487 - protein, 9 aa, synthetic construct
LLALYNQGH

SEQ ID NO: 2488 - protein, 9 aa, synthetic construct
LLDEAIEAV

SEQ ID NO: 2489 - protein, 9 aa, synthetic construct
LLDEHHISY

SEQ ID NO: 2490 - protein, 9 aa, synthetic construct
LLDGGVINL

SEQ ID NO: 2491 - protein, 9 aa, synthetic construct
LLDGVPVAL

SEQ ID NO: 2492 - protein, 10 aa, synthetic construct
LLDQGQLNKY

SEQ ID NO: 2493 - protein, 9 aa, synthetic construct
LLDRFLATV

SEQ ID NO: 2494 - protein, 9 aa, synthetic construct
LLDTVTMQV

SEQ ID NO: 2495 - protein, 9 aa, synthetic construct
LLDVPTAAV

SEQ ID NO: 2496 - protein, 8 aa, synthetic construct
LLEGDHVR

SEQ ID NO: 2497 - protein, 9 aa, synthetic construct
LLETHLPSK

SEQ ID NO: 2498 - protein, 9 aa, synthetic construct
LLFDRPMHV

SEQ ID NO: 2499 - protein, 9 aa, synthetic construct
LLGAGESGK

SEQ ID NO: 2500 - protein, 9 aa, synthetic construct
LLGPDPAAA

SEQ ID NO: 2501 - protein, 10 aa, synthetic construct
LLGSAHEVQR

SEQ ID NO: 2502 - protein, 8 aa, synthetic construct
LLHIARTH

SEQ ID NO: 2503 - protein, 8 aa, synthetic construct
LLHTLEGH

SEQ ID NO: 2504 - protein, 11 aa, synthetic construct
LLIPTYSRTLL

SEQ ID NO: 2505 - protein, 10 aa, synthetic construct
LLKMEQEIID

SEQ ID NO: 2506 - protein, 10 aa, synthetic construct
LLLAGMHRNL

SEQ ID NO: 2507 - protein, 8 aa, synthetic construct
LLLLADRA

SEQ ID NO: 2508 - protein, 9 aa, synthetic construct
LLMVLSPRL

SEQ ID NO: 2509 - protein, 9 aa, synthetic construct
LLPGNARCL

SEQ ID NO: 2510 - protein, 9 aa, synthetic construct
LLPSHASYL

SEQ ID NO: 2511 - protein, 11 aa, synthetic construct
LLPSQHNDIIR

SEQ ID NO: 2512 - protein, 8 aa, synthetic construct
LLQEYIMR

SEQ ID NO: 2513 - protein, 8 aa, synthetic construct
LLQILEKG

SEQ ID NO: 2514 - protein, 9 aa, synthetic construct
LLTDIIAAY

SEQ ID NO: 2515 - protein, 9 aa, synthetic construct
LLYESPERY

SEQ ID NO: 2516 - protein, 9 aa, synthetic construct
LNLQEYQSK

SEQ ID NO: 2517 - protein, 9 aa, synthetic construct
LPAAAQDVY

SEQ ID NO: 2518 - protein, 10 aa, synthetic construct
LPAAAQDVYY

SEQ ID NO: 2519 - protein, 10 aa, synthetic construct
LPAATFQVTY

SEQ ID NO: 2520 - protein, 11 aa, synthetic construct
LPADIRIPDGY

SEQ ID NO: 2521 - protein, 10 aa, synthetic construct
LPADITEDEF

SEQ ID NO: 2522 - protein, 9 aa, synthetic construct
LPADVQNYY

SEQ ID NO: 2523 - protein, 9 aa, synthetic construct
LPADVQTAF

SEQ ID NO: 2524 - protein, 10 aa, synthetic construct
LPAFLDNHNY

SEQ ID NO: 2525 - protein, 10 aa, synthetic construct
LPAGGAPTVF

SEQ ID NO: 2526 - protein, 9 aa, synthetic construct
LPAGIVAVL

SEQ ID NO: 2527 - protein, 10 aa, synthetic construct
LPAGVKSPPY

SEQ ID NO: 2528 - protein, 11 aa, synthetic construct
LPAKAQIHGGI

SEQ ID NO: 2529 - protein, 9 aa, synthetic construct
LPAKILVEF

SEQ ID NO: 2530 - protein, 9 aa, synthetic construct
LPALGFSTY

SEQ ID NO: 2531 - protein, 9 aa, synthetic construct
LPAPDFIDY

SEQ ID NO: 2532 - protein, 9 aa, synthetic construct
LPAPGVPAW

SEQ ID NO: 2533 - protein, 9 aa, synthetic construct
LPAPPAVSA

SEQ ID NO: 2534 - protein, 9 aa, synthetic construct
LPAPPFIAF

SEQ ID NO: 2535 - protein, 11 aa, synthetic construct
LPAPPHIDVMY

SEQ ID NO: 2536 - protein, 9 aa, synthetic construct
LPAPPTQNM

SEQ ID NO: 2537 - protein, 10 aa, synthetic construct
LPAPTAEAAF

SEQ ID NO: 2538 - protein, 9 aa, synthetic construct
LPAQDLFDY

SEQ ID NO: 2539 - protein, 9 aa, synthetic construct
LPAQGLIEF

SEQ ID NO: 2540 - protein, 9 aa, synthetic construct
LPAVESTTY

SEQ ID NO: 2541 - protein, 9 aa, synthetic construct
LPCGASVIL

SEQ ID NO: 2542 - protein, 9 aa, synthetic construct
LPCLELPTY

SEQ ID NO: 2543 - protein, 9 aa, synthetic construct
LPCPLLPSY

SEQ ID NO: 2544 - protein, 9 aa, synthetic construct
LPDAMDLEL

SEQ ID NO: 2545 - protein, 9 aa, synthetic construct
LPDAMNIEL

SEQ ID NO: 2546 - protein, 9 aa, synthetic construct
LPDAMSFEL

SEQ ID NO: 2547 - protein, 9 aa, synthetic construct
LPDEDLASF

SEQ ID NO: 2548 - protein, 9 aa, synthetic construct
LPDEIYHVY

SEQ ID NO: 2549 - protein, 9 aa, synthetic construct
LPDETANLL

SEQ ID NO: 2550 - protein, 9 aa, synthetic construct
LPDFGGNVL

SEQ ID NO: 2551 - protein, 9 aa, synthetic construct
LPDGSRVEL

SEQ ID NO: 2552 - protein, 10 aa, synthetic construct
LPDLSGPHSY

SEQ ID NO: 2553 - protein, 9 aa, synthetic construct
LPDQVLRVF

SEQ ID NO: 2554 - protein, 11 aa, synthetic construct
LPDRALVNCQY

SEQ ID NO: 2555 - protein, 10 aa, synthetic construct
LPDSESSFTY

SEQ ID NO: 2556 - protein, 9 aa, synthetic construct
LPDSGVVEY

SEQ ID NO: 2557 - protein, 9 aa, synthetic construct
LPDSSISDY

SEQ ID NO: 2558 - protein, 9 aa, synthetic construct
LPDSTPLGF

SEQ ID NO: 2559 - protein, 9 aa, synthetic construct
LPEELARMY

SEQ ID NO: 2560 - protein, 9 aa, synthetic construct
LPEELFLLL

SEQ ID NO: 2561 - protein, 9 aa, synthetic construct
LPEQSPVSY

SEQ ID NO: 2562 - protein, 9 aa, synthetic construct
LPESTHVEF

SEQ ID NO: 2563 - protein, 9 aa, synthetic construct
LPETELGEY

SEQ ID NO: 2564 - protein, 8 aa, synthetic construct
LPFAGDIY

SEQ ID NO: 2565 - protein, 9 aa, synthetic construct
LPFCPPVVL

SEQ ID NO: 2566 - protein, 11 aa, synthetic construct
LPFCQPSKITY

SEQ ID NO: 2567 - protein, 9 aa, synthetic construct
LPFDFTWKM

SEQ ID NO: 2568 - protein, 9 aa, synthetic construct
LPFDKETGF

SEQ ID NO: 2569 - protein, 9 aa, synthetic construct
LPFDLRASF

SEQ ID NO: 2570 - protein, 9 aa, synthetic construct
LPFFNDRPW

SEQ ID NO: 2571 - protein, 9 aa, synthetic construct
LPFFPIATY

SEQ ID NO: 2572 - protein, 11 aa, synthetic construct
LPFFTEREQTL

SEQ ID NO: 2573 - protein, 11 aa, synthetic construct
LPFGEHPQQEY

SEQ ID NO: 2574 - protein, 9 aa, synthetic construct
LPFHFPGSF

SEQ ID NO: 2575 - protein, 8 aa, synthetic construct
LPFLIEDY

SEQ ID NO: 2576 - protein, 11 aa, synthetic construct
LPFLKPDDIQY

SEQ ID NO: 2577 - protein, 10 aa, synthetic construct
LPFMEDLRQY

SEQ ID NO: 2578 - protein, 11 aa, synthetic construct
LPFPESQLVEF

SEQ ID NO: 2579 - protein, 9 aa, synthetic construct
LPFPIIQQY

SEQ ID NO: 2580 - protein, 9 aa, synthetic construct
LPFPKDASL

SEQ ID NO: 2581 - protein, 9 aa, synthetic construct
LPFPKIDPY

SEQ ID NO: 2582 - protein, 10 aa, synthetic construct
LPFSDPAHAL

SEQ ID NO: 2583 - protein, 10 aa, synthetic construct
LPFSPQAHSY

SEQ ID NO: 2584 - protein, 10 aa, synthetic construct
LPFSSMPTAY

SEQ ID NO: 2585 - protein, 8 aa, synthetic construct
LPFTPLSY

SEQ ID NO: 2586 - protein, 9 aa, synthetic construct
LPGGPTLTF

SEQ ID NO: 2587 - protein, 9 aa, synthetic construct
LPGPAFESY

SEQ ID NO: 2588 - protein, 9 aa, synthetic construct
LPGSIQHVY

SEQ ID NO: 2589 - protein, 10 aa, synthetic construct
LPHGFCTVTY

SEQ ID NO: 2590 - protein, 10 aa, synthetic construct
LPHGLGGIGM

SEQ ID NO: 2591 - protein, 10 aa, synthetic construct
LPHMHNIVEY

SEQ ID NO: 2592 - protein, 9 aa, synthetic construct
LPHQPLATY

SEQ ID NO: 2593 - protein, 9 aa, synthetic construct
LPHSATVTL

SEQ ID NO: 2594 - protein, 9 aa, synthetic construct
LPHVGVSDF

SEQ ID NO: 2595 - protein, 9 aa, synthetic construct
LPIATVEEL

SEQ ID NO: 2596 - protein, 10 aa, synthetic construct
LPIDPNEPTY

SEQ ID NO: 2597 - protein, 9 aa, synthetic construct
LPIEAPIRM

SEQ ID NO: 2598 - protein, 10 aa, synthetic construct
LPIENDTYKY

SEQ ID NO: 2599 - protein, 10 aa, synthetic construct
LPIESNPHSF

SEQ ID NO: 2600 - protein, 9 aa, synthetic construct
LPIGATVNM

SEQ ID NO: 2601 - protein, 10 aa, synthetic construct
LPIGDVATQY

SEQ ID NO: 2602 - protein, 11 aa, synthetic construct
LPIGDVATQYF

SEQ ID NO: 2603 - protein, 10 aa, synthetic construct
LPIISAGSEL

SEQ ID NO: 2604 - protein, 11 aa, synthetic construct
LPINDPLQTVY

SEQ ID NO: 2605 - protein, 9 aa, synthetic construct
LPINHQIIY

SEQ ID NO: 2606 - protein, 11 aa, synthetic construct
LPIPVDAKVGY

SEQ ID NO: 2607 - protein, 10 aa, synthetic construct
LPIPVICVTY

SEQ ID NO: 2608 - protein, 9 aa, synthetic construct
LPIRGFVGY

SEQ ID NO: 2609 - protein, 10 aa, synthetic construct
LPIYGQDVIY

SEQ ID NO: 2610 - protein, 9 aa, synthetic construct
LPKEDLIKF

SEQ ID NO: 2611 - protein, 9 aa, synthetic construct
LPKNDLITY

SEQ ID NO: 2612 - protein, 9 aa, synthetic construct
LPKTTALEL

SEQ ID NO: 2613 - protein, 9 aa, synthetic construct
LPLAHVLEL

SEQ ID NO: 2614 - protein, 9 aa, synthetic construct
LPLALGLAI

SEQ ID NO: 2615 - protein, 9 aa, synthetic construct
LPLASQEAL

SEQ ID NO: 2616 - protein, 10 aa, synthetic construct
LPLDSFIDVY

SEQ ID NO: 2617 - protein, 10 aa, synthetic construct
LPLERDAESF

SEQ ID NO: 2618 - protein, 9 aa, synthetic construct
LPLHGGYQY

SEQ ID NO: 2619 - protein, 9 aa, synthetic construct
LPLLHPNYF

SEQ ID NO: 2620 - protein, 9 aa, synthetic construct
LPLNSVYVY

SEQ ID NO: 2621 - protein, 10 aa, synthetic construct
LPLPAPHAQY

SEQ ID NO: 2622 - protein, 11 aa, synthetic construct
LPLPNDKTLLY

SEQ ID NO: 2623 - protein, 10 aa, synthetic construct
LPLPPIPHVF

SEQ ID NO: 2624 - protein, 10 aa, synthetic construct
LPLPSPALEY

SEQ ID NO: 2625 - protein, 10 aa, synthetic construct
LPLPTPATVY

SEQ ID NO: 2626 - protein, 8 aa, synthetic construct
LPLQANVY

SEQ ID NO: 2627 - protein, 11 aa, synthetic construct
LPLSIEGHVHY

SEQ ID NO: 2628 - protein, 10 aa, synthetic construct
LPLSIKDDEY

SEQ ID NO: 2629 - protein, 11 aa, synthetic construct
LPLTDSQIVQK

SEQ ID NO: 2630 - protein, 9 aa, synthetic construct
LPMDLGTFY

SEQ ID NO: 2631 - protein, 9 aa, synthetic construct
LPMGVVVDY

SEQ ID NO: 2632 - protein, 10 aa, synthetic construct
LPNAMAISEM

SEQ ID NO: 2633 - protein, 9 aa, synthetic construct
LPNFGFVVF

SEQ ID NO: 2634 - protein, 9 aa, synthetic construct
LPNGLDVTF

SEQ ID NO: 2635 - protein, 9 aa, synthetic construct
LPNNIVDVW

SEQ ID NO: 2636 - protein, 9 aa, synthetic construct
LPNSLPTEY

SEQ ID NO: 2637 - protein, 9 aa, synthetic construct
LPPDIERPY

SEQ ID NO: 2638 - protein, 9 aa, synthetic construct
LPPEELVPY

SEQ ID NO: 2639 - protein, 10 aa, synthetic construct
LPPLPKRPAL

SEQ ID NO: 2640 - protein, 9 aa, synthetic construct
LPPPSDPQY

SEQ ID NO: 2641 - protein, 9 aa, synthetic construct
LPPVETVGF

SEQ ID NO: 2642 - protein, 9 aa, synthetic construct
LPQEAFEKY

SEQ ID NO: 2643 - protein, 9 aa, synthetic construct
LPQEDLEAL

SEQ ID NO: 2644 - protein, 9 aa, synthetic construct
LPQELDFKY

SEQ ID NO: 2645 - protein, 9 aa, synthetic construct
LPQELLQAY

SEQ ID NO: 2646 - protein, 9 aa, synthetic construct
LPQFSSIEY

SEQ ID NO: 2647 - protein, 9 aa, synthetic construct
LPQGIVREL

SEQ ID NO: 2648 - protein, 9 aa, synthetic construct
LPQGRPPVF

SEQ ID NO: 2649 - protein, 9 aa, synthetic construct
LPQHQVPAY

SEQ ID NO: 2650 - protein, 11 aa, synthetic construct
LPQLTGAENVL

SEQ ID NO: 2651 - protein, 9 aa, synthetic construct
LPRLPVPAV

SEQ ID NO: 2652 - protein, 10 aa, synthetic construct
LPSDIAVIMY

SEQ ID NO: 2653 - protein, 9 aa, synthetic construct
LPSDKALVL

SEQ ID NO: 2654 - protein, 9 aa, synthetic construct
LPSDVVSAL

SEQ ID NO: 2655 - protein, 9 aa, synthetic construct
LPSDVVTGY

SEQ ID NO: 2656 - protein, 10 aa, synthetic construct
LPSDVVTGYL

SEQ ID NO: 2657 - protein, 10 aa, synthetic construct
LPSEAGFAEY

SEQ ID NO: 2658 - protein, 9 aa, synthetic construct
LPSEKNLEY

SEQ ID NO: 2659 - protein, 9 aa, synthetic construct
LPSGVGPEY

SEQ ID NO: 2660 - protein, 9 aa, synthetic construct
LPSIYPSTY

SEQ ID NO: 2661 - protein, 9 aa, synthetic construct
LPSPATPRF

SEQ ID NO: 2662 - protein, 10 aa, synthetic construct
LPSPDKLPGF

SEQ ID NO: 2663 - protein, 9 aa, synthetic construct
LPSSEVVKF

SEQ ID NO: 2664 - protein, 9 aa, synthetic construct
LPSTCIVTL

SEQ ID NO: 2665 - protein, 10 aa, synthetic construct
LPSVVIPLHY

SEQ ID NO: 2666 - protein, 9 aa, synthetic construct
LPSYQAVEY

SEQ ID NO: 2667 - protein, 9 aa, synthetic construct
LPTADIAQF

SEQ ID NO: 2668 - protein, 9 aa, synthetic construct
LPTDSAIIM

SEQ ID NO: 2669 - protein, 9 aa, synthetic construct
LPTEAEFQL

SEQ ID NO: 2670 - protein, 9 aa, synthetic construct
LPTEAEWEY

SEQ ID NO: 2671 - protein, 9 aa, synthetic construct
LPTEEEWEF

SEQ ID NO: 2672 - protein, 9 aa, synthetic construct
LPTLPAKVY

SEQ ID NO: 2673 - protein, 11 aa, synthetic construct
LPTPSDIFVSY

SEQ ID NO: 2674 - protein, 9 aa, synthetic construct
LPTPSPEAY

SEQ ID NO: 2675 - protein, 9 aa, synthetic construct
LPTQLLNSY

SEQ ID NO: 2676 - protein, 8 aa, synthetic construct
LPTTGVLY

SEQ ID NO: 2677 - protein, 9 aa, synthetic construct
LPTVLIIAF

SEQ ID NO: 2678 - protein, 9 aa, synthetic construct
LPVATDFEF

SEQ ID NO: 2679 - protein, 9 aa, synthetic construct
LPVDAVISV

SEQ ID NO: 2680 - protein, 11 aa, synthetic construct
LPVDFSNIPTY

SEQ ID NO: 2681 - protein, 9 aa, synthetic construct
LPVDLAEEL

SEQ ID NO: 2682 - protein, 9 aa, synthetic construct
LPVEDDIDL

SEQ ID NO: 2683 - protein, 9 aa, synthetic construct
LPVEEFNEL

SEQ ID NO: 2684 - protein, 9 aa, synthetic construct
LPVEKLPKY

SEQ ID NO: 2685 - protein, 9 aa, synthetic construct
LPVEQGFTF

SEQ ID NO: 2686 - protein, 9 aa, synthetic construct
LPVHVFEAL

SEQ ID NO: 2687 - protein, 9 aa, synthetic construct
LPVIIFTTF

SEQ ID NO: 2688 - protein, 9 aa, synthetic construct
LPVLSTDKF

SEQ ID NO: 2689 - protein, 9 aa, synthetic construct
LPVLVPSSY

SEQ ID NO: 2690 - protein, 9 aa, synthetic construct
LPVNEETLF

SEQ ID NO: 2691 - protein, 9 aa, synthetic construct
LPVNESFGF

SEQ ID NO: 2692 - protein, 11 aa, synthetic construct
LPVPNLDPDTY

SEQ ID NO: 2693 - protein, 8 aa, synthetic construct
LPVTGVCY

SEQ ID NO: 2694 - protein, 10 aa, synthetic construct
LPVTPILEGF

SEQ ID NO: 2695 - protein, 9 aa, synthetic construct
LPVTTAEGM

SEQ ID NO: 2696 - protein, 11 aa, synthetic construct
LPVVSSLADVY

SEQ ID NO: 2697 - protein, 9 aa, synthetic construct
LPWNITVHF

SEQ ID NO: 2698 - protein, 9 aa, synthetic construct
LPWVGKELY

SEQ ID NO: 2699 - protein, 9 aa, synthetic construct
LPYAEGFAY

SEQ ID NO: 2700 - protein, 10 aa, synthetic construct
LPYFNIRDIY

SEQ ID NO: 2701 - protein, 11 aa, synthetic construct
LPYKATENDIY

SEQ ID NO: 2702 - protein, 9 aa, synthetic construct
LPYNDYFEY

SEQ ID NO: 2703 - protein, 10 aa, synthetic construct
LPYNQPGTCY

SEQ ID NO: 2704 - protein, 11 aa, synthetic construct
LPYPDPAIAQF

SEQ ID NO: 2705 - protein, 9 aa, synthetic construct
LPYPSSATL

SEQ ID NO: 2706 - protein, 8 aa, synthetic construct
LPYQIKKI

SEQ ID NO: 2707 - protein, 10 aa, synthetic construct
LPYSHPGVVF

SEQ ID NO: 2708 - protein, 8 aa, synthetic construct
LQAFAIAL

SEQ ID NO: 2709 - protein, 9 aa, synthetic construct
LQDVVSHSK

SEQ ID NO: 2710 - protein, 9 aa, synthetic construct
LQERDQEVK

SEQ ID NO: 2711 - protein, 8 aa, synthetic construct
LQEVPVDE

SEQ ID NO: 2712 - protein, 9 aa, synthetic construct
LQFDGIHVV

SEQ ID NO: 2713 - protein, 11 aa, synthetic construct
LQGLEWMVSLY

SEQ ID NO: 2714 - protein, 8 aa, synthetic construct
LQHGLPQI

SEQ ID NO: 2715 - protein, 8 aa, synthetic construct
LQILDVRL

SEQ ID NO: 2716 - protein, 8 aa, synthetic construct
LQLKMIGI

SEQ ID NO: 2717 - protein, 10 aa, synthetic construct
LQNEPLPERL

SEQ ID NO: 2718 - protein, 9 aa, synthetic construct
LQPLNVEID

SEQ ID NO: 2719 - protein, 9 aa, synthetic construct
LQRANLLSY

SEQ ID NO: 2720 - protein, 8 aa, synthetic construct
LQYLVPIL

SEQ ID NO: 2721 - protein, 8 aa, synthetic construct
LQYTPPVV

SEQ ID NO: 2722 - protein, 9 aa, synthetic construct
LRFQSSAVM

SEQ ID NO: 2723 - protein, 8 aa, synthetic construct
LRPPLLQL

SEQ ID NO: 2724 - protein, 10 aa, synthetic construct
LRTALIFGGF

SEQ ID NO: 2725 - protein, 9 aa, synthetic construct
LRYGLPVNF

SEQ ID NO: 2726 - protein, 9 aa, synthetic construct
LRYPMAVGL

SEQ ID NO: 2727 - protein, 10 aa, synthetic construct
LSAARDPTLL

SEQ ID NO: 2728 - protein, 8 aa, synthetic construct
LSAEEAAK

SEQ ID NO: 2729 - protein, 11 aa, synthetic construct
LSDALPDNENK

SEQ ID NO: 2730 - protein, 9 aa, synthetic construct
LSDKNIEQY

SEQ ID NO: 2731 - protein, 11 aa, synthetic construct
LSDLALHFLNK

SEQ ID NO: 2732 - protein, 9 aa, synthetic construct
LSDSFSDLY

SEQ ID NO: 2733 - protein, 11 aa, synthetic construct
LSDSLSGSSLY

SEQ ID NO: 2734 - protein, 11 aa, synthetic construct
LSEEEDLPLDS

SEQ ID NO: 2735 - protein, 9 aa, synthetic construct
LSEPSSLQY

SEQ ID NO: 2736 - protein, 10 aa, synthetic construct
LSGIIFSYSQ

SEQ ID NO: 2737 - protein, 11 aa, synthetic construct
LSGLFDTGLHH

SEQ ID NO: 2738 - protein, 9 aa, synthetic construct
LSHEESVSF

SEQ ID NO: 2739 - protein, 9 aa, synthetic construct
LSIEDFTAY

SEQ ID NO: 2740 - protein, 10 aa, synthetic construct
LSLLGDIATD

SEQ ID NO: 2741 - protein, 11 aa, synthetic construct
LSLLQDSGEVR

SEQ ID NO: 2742 - protein, 11 aa, synthetic construct
LSPEEAYDLGR

SEQ ID NO: 2743 - protein, 9 aa, synthetic construct
LSPMSVNAV

SEQ ID NO: 2744 - protein, 9 aa, synthetic construct
LSPSSDLTL

SEQ ID NO: 2745 - protein, 9 aa, synthetic construct
LSPTGTTEF

SEQ ID NO: 2746 - protein, 9 aa, synthetic construct
LSPTRELAL

SEQ ID NO: 2747 - protein, 8 aa, synthetic construct
LSPVNASI

SEQ ID NO: 2748 - protein, 9 aa, synthetic construct
LTDFIREEY

SEQ ID NO: 2749 - protein, 10 aa, synthetic construct
LTDITKGVQY

SEQ ID NO: 2750 - protein, 9 aa, synthetic construct
LTDLVDDNY

SEQ ID NO: 2751 - protein, 9 aa, synthetic construct
LTDRLASLY

SEQ ID NO: 2752 - protein, 10 aa, synthetic construct
LTEVDNYHFY

SEQ ID NO: 2753 - protein, 9 aa, synthetic construct
LTPPVATEL

SEQ ID NO: 2754 - protein, 9 aa, synthetic construct
LTVEPGASL

SEQ ID NO: 2755 - protein, 8 aa, synthetic construct
LVDDPLEY

SEQ ID NO: 2756 - protein, 9 aa, synthetic construct
LVDPSVYGY

SEQ ID NO: 2757 - protein, 9 aa, synthetic construct
LVIEFSEEY

SEQ ID NO: 2758 - protein, 9 aa, synthetic construct
LVIITAGAR

SEQ ID NO: 2759 - protein, 9 aa, synthetic construct
LVLLLGSYS

SEQ ID NO: 2760 - protein, 10 aa, synthetic construct
LVRPGTALEL

SEQ ID NO: 2761 - protein, 9 aa, synthetic construct
LVSASQDGK

SEQ ID NO: 2762 - protein, 9 aa, synthetic construct
LVTDIQPVL

SEQ ID NO: 2763 - protein, 9 aa, synthetic construct
LVTDLDTEY

SEQ ID NO: 2764 - protein, 9 aa, synthetic construct
LVVGVFVVY

SEQ ID NO: 2765 - protein, 10 aa, synthetic construct
LVVLEHGLYA

SEQ ID NO: 2766 - protein, 8 aa, synthetic construct
LVVLYHYV

SEQ ID NO: 2767 - protein, 9 aa, synthetic construct
LWDEVLSHL

SEQ ID NO: 2768 - protein, 9 aa, synthetic construct
LYDEAIRHF

SEQ ID NO: 2769 - protein, 9 aa, synthetic construct
LYDFIHTSF

SEQ ID NO: 2770 - protein, 8 aa, synthetic construct
LYDRPLKI

SEQ ID NO: 2771 - protein, 9 aa, synthetic construct
LYDVPANSM

SEQ ID NO: 2772 - protein, 9 aa, synthetic construct
LYPQFMFHL

SEQ ID NO: 2773 - protein, 11 aa, synthetic construct
LYQEIEMGLKF

SEQ ID NO: 2774 - protein, 10 aa, synthetic construct
LYRDPGVSRP

SEQ ID NO: 2775 - protein, 9 aa, synthetic construct
LYRPGSVAY

SEQ ID NO: 2776 - protein, 9 aa, synthetic construct
LYTEKFEEF

SEQ ID NO: 2777 - protein, 9 aa, synthetic construct
LYYDAIWHF

SEQ ID NO: 2778 - protein, 11 aa, synthetic construct
MAAAAAAAAAW

SEQ ID NO: 2779 - protein, 10 aa, synthetic construct
MAADADEVSF

SEQ ID NO: 2780 - protein, 9 aa, synthetic construct
MAAKILEEF

SEQ ID NO: 2781 - protein, 9 aa, synthetic construct
MAAMPQTVY

SEQ ID NO: 2782 - protein, 10 aa, synthetic construct
MALDIEIATY

SEQ ID NO: 2783 - protein, 9 aa, synthetic construct
MALPSQHSL

SEQ ID NO: 2784 - protein, 9 aa, synthetic construct
MAPQNLSTF

SEQ ID NO: 2785 - protein, 9 aa, synthetic construct
MAPVASIWL

SEQ ID NO: 2786 - protein, 10 aa, synthetic construct
MAQIIVAIQM

SEQ ID NO: 2787 - protein, 11 aa, synthetic construct
MATGDLDQDGR

SEQ ID NO: 2788 - protein, 9 aa, synthetic construct
MAVGGGLAV

SEQ ID NO: 2789 - protein, 9 aa, synthetic construct
MAVIDGNVM

SEQ ID NO: 2790 - protein, 9 aa, synthetic construct
MAVMPSITY

SEQ ID NO: 2791 - protein, 11 aa, synthetic construct
MDVIQHETIGK

SEQ ID NO: 2792 - protein, 8 aa, synthetic construct
MDVVYALK

SEQ ID NO: 2793 - protein, 9 aa, synthetic construct
MEDAKVYVA

SEQ ID NO: 2794 - protein, 9 aa, synthetic construct
MEENFAVEA

SEQ ID NO: 2795 - protein, 9 aa, synthetic construct
MEFEGAIIA

SEQ ID NO: 2796 - protein, 9 aa, synthetic construct
MEFQRFVTP

SEQ ID NO: 2797 - protein, 9 aa, synthetic construct
MEHPYFYTV

SEQ ID NO: 2798 - protein, 9 aa, synthetic construct
MEIERILGV

SEQ ID NO: 2799 - protein, 9 aa, synthetic construct
MELITILEK

SEQ ID NO: 2800 - protein, 9 aa, synthetic construct
MELRLKAVA

SEQ ID NO: 2801 - protein, 9 aa, synthetic construct
METVWTILP

SEQ ID NO: 2802 - protein, 9 aa, synthetic construct
MEVKPPPGR

SEQ ID NO: 2803 - protein, 9 aa, synthetic construct
MFDEKLVTV

SEQ ID NO: 2804 - protein, 9 aa, synthetic construct
MFDIVGTHL

SEQ ID NO: 2805 - protein, 9 aa, synthetic construct
MFDKDVVML

SEQ ID NO: 2806 - protein, 10 aa, synthetic construct
MFLYNLTLQR

SEQ ID NO: 2807 - protein, 9 aa, synthetic construct
MGPRPGLTL

SEQ ID NO: 2808 - protein, 8 aa, synthetic construct
MHKAELVK

SEQ ID NO: 2809 - protein, 9 aa, synthetic construct
MIIEDETEF

SEQ ID NO: 2810 - protein, 11 aa, synthetic construct
MILPVGAESFR

SEQ ID NO: 2811 - protein, 9 aa, synthetic construct
MIPLLLAAL

SEQ ID NO: 2812 - protein, 9 aa, synthetic construct
MIPTFTALL

SEQ ID NO: 2813 - protein, 9 aa, synthetic construct
MLDPLEVHL

SEQ ID NO: 2814 - protein, 11 aa, synthetic construct
MLNPPAEVTTK

SEQ ID NO: 2815 - protein, 8 aa, synthetic construct
MLSIDVAE

SEQ ID NO: 2816 - protein, 8 aa, synthetic construct
MLSLAAKL

SEQ ID NO: 2817 - protein, 9 aa, synthetic construct
MMPDGTLGL

SEQ ID NO: 2818 - protein, 11 aa, synthetic construct
MNIALLSDLTK

SEQ ID NO: 2819 - protein, 9 aa, synthetic construct
MNSLGVNPR

SEQ ID NO: 2820 - protein, 11 aa, synthetic construct
MNSLSEANTKF

SEQ ID NO: 2821 - protein, 8 aa, synthetic construct
MNVIDHVR

SEQ ID NO: 2822 - protein, 9 aa, synthetic construct
MPADIATLL

SEQ ID NO: 2823 - protein, 10 aa, synthetic construct
MPADSGYPAY

SEQ ID NO: 2824 - protein, 9 aa, synthetic construct
MPAGTELTY

SEQ ID NO: 2825 - protein, 9 aa, synthetic construct
MPAPEIVSY

SEQ ID NO: 2826 - protein, 10 aa, synthetic construct
MPDEATPHYF

SEQ ID NO: 2827 - protein, 9 aa, synthetic construct
MPDHVIPEI

SEQ ID NO: 2828 - protein, 9 aa, synthetic construct
MPDTPDIVL

SEQ ID NO: 2829 - protein, 9 aa, synthetic construct
MPEFVNAAF

SEQ ID NO: 2830 - protein, 11 aa, synthetic construct
MPEGEKLVNYY

SEQ ID NO: 2831 - protein, 9 aa, synthetic construct
MPEPTVLSL

SEQ ID NO: 2832 - protein, 10 aa, synthetic construct
MPETSHIVAL

SEQ ID NO: 2833 - protein, 10 aa, synthetic construct
MPFAPAIQTF

SEQ ID NO: 2834 - protein, 9 aa, synthetic construct
MPFGNVISA

SEQ ID NO: 2835 - protein, 9 aa, synthetic construct
MPFGNVVSA

SEQ ID NO: 2836 - protein, 10 aa, synthetic construct
MPFQRAGVNF

SEQ ID NO: 2837 - protein, 9 aa, synthetic construct
MPFSELAGL

SEQ ID NO: 2838 - protein, 11 aa, synthetic construct
MPFTIAAEKVY

SEQ ID NO: 2839 - protein, 9 aa, synthetic construct
MPFYNPAQL

SEQ ID NO: 2840 - protein, 9 aa, synthetic construct
MPFYPRVVY

SEQ ID NO: 2841 - protein, 9 aa, synthetic construct
MPGDLFNLY

SEQ ID NO: 2842 - protein, 10 aa, synthetic construct
MPGEGDLPQM

SEQ ID NO: 2843 - protein, 10 aa, synthetic construct
MPGLETAVVF

SEQ ID NO: 2844 - protein, 10 aa, synthetic construct
MPHAPIGLYF

SEQ ID NO: 2845 - protein, 9 aa, synthetic construct
MPHDLITQL

SEQ ID NO: 2846 - protein, 10 aa, synthetic construct
MPIEPGDIGY

SEQ ID NO: 2847 - protein, 11 aa, synthetic construct
MPIKDNALVMF

SEQ ID NO: 2848 - protein, 9 aa, synthetic construct
MPIKFDKIL

SEQ ID NO: 2849 - protein, 9 aa, synthetic construct
MPIPRNQNF

SEQ ID NO: 2850 - protein, 9 aa, synthetic construct
MPKFSMPGF

SEQ ID NO: 2851 - protein, 9 aa, synthetic construct
MPKISMPGF

SEQ ID NO: 2852 - protein, 8 aa, synthetic construct
MPKVHIEF

SEQ ID NO: 2853 - protein, 9 aa, synthetic construct
MPLEDMNEF

SEQ ID NO: 2854 - protein, 9 aa, synthetic construct
MPLEEGDTF

SEQ ID NO: 2855 - protein, 11 aa, synthetic construct
MPLFDITGQDF

SEQ ID NO: 2856 - protein, 9 aa, synthetic construct
MPLQLLLLL

SEQ ID NO: 2857 - protein, 10 aa, synthetic construct
MPNHSASIQL

SEQ ID NO: 2858 - protein, 10 aa, synthetic construct
MPPQNVGEVY

SEQ ID NO: 2859 - protein, 9 aa, synthetic construct
MPQHIMAIL

SEQ ID NO: 2860 - protein, 9 aa, synthetic construct
MPRGVVVTL

SEQ ID NO: 2861 - protein, 8 aa, synthetic construct
MPSPDVVY

SEQ ID NO: 2862 - protein, 9 aa, synthetic construct
MPSPVSPKL

SEQ ID NO: 2863 - protein, 10 aa, synthetic construct
MPSRFPPVVF

SEQ ID NO: 2864 - protein, 10 aa, synthetic construct
MPSSDTTVTF

SEQ ID NO: 2865 - protein, 8 aa, synthetic construct
MPTVHYEF

SEQ ID NO: 2866 - protein, 10 aa, synthetic construct
MPVDDVIGTL

SEQ ID NO: 2867 - protein, 9 aa, synthetic construct
MPVFPDFKM

SEQ ID NO: 2868 - protein, 9 aa, synthetic construct
MPVGPDAIL

SEQ ID NO: 2869 - protein, 11 aa, synthetic construct
MPVGPDAILRY

SEQ ID NO: 2870 - protein, 9 aa, synthetic construct
MPVPTTPEF

SEQ ID NO: 2871 - protein, 11 aa, synthetic construct
MPVRGPDVEAY

SEQ ID NO: 2872 - protein, 10 aa, synthetic construct
MPYDSNRVVL

SEQ ID NO: 2873 - protein, 10 aa, synthetic construct
MPYDTPVPGY

SEQ ID NO: 2874 - protein, 8 aa, synthetic construct
MQFRSILI

SEQ ID NO: 2875 - protein, 9 aa, synthetic construct
MQHITGLTV

SEQ ID NO: 2876 - protein, 8 aa, synthetic construct
MQIMVRLI

SEQ ID NO: 2877 - protein, 8 aa, synthetic construct
MQQILTRV

SEQ ID NO: 2878 - protein, 8 aa, synthetic construct
MQVLVSRI

SEQ ID NO: 2879 - protein, 9 aa, synthetic construct
MQYPISINV

SEQ ID NO: 2880 - protein, 9 aa, synthetic construct
MRFDGLLGF

SEQ ID NO: 2881 - protein, 9 aa, synthetic construct
MRFLAATFL

SEQ ID NO: 2882 - protein, 9 aa, synthetic construct
MRKEFTLEF

SEQ ID NO: 2883 - protein, 9 aa, synthetic construct
MRQKAVSLF

SEQ ID NO: 2884 - protein, 10 aa, synthetic construct
MRQKAVSLFL

SEQ ID NO: 2885 - protein, 9 aa, synthetic construct
MSPLSETEM

SEQ ID NO: 2886 - protein, 9 aa, synthetic construct
MSPSGRLCL

SEQ ID NO: 2887 - protein, 10 aa, synthetic construct
MSPVLHTQNK

SEQ ID NO: 2888 - protein, 8 aa, synthetic construct
MSQILPCI

SEQ ID NO: 2889 - protein, 10 aa, synthetic construct
MVANRGEIAI

SEQ ID NO: 2890 - protein, 9 aa, synthetic construct
MVAPAVASV

SEQ ID NO: 2891 - protein, 9 aa, synthetic construct
MVFGAPVPK

SEQ ID NO: 2892 - protein, 11 aa, synthetic construct
MVGPIEEAVAK

SEQ ID NO: 2893 - protein, 8 aa, synthetic construct
MVGVIILY

SEQ ID NO: 2894 - protein, 10 aa, synthetic construct
NAAEIIIDIY

SEQ ID NO: 2895 - protein, 9 aa, synthetic construct
NAAPCAVSY

SEQ ID NO: 2896 - protein, 11 aa, synthetic construct
NAAPGVDLTQL

SEQ ID NO: 2897 - protein, 9 aa, synthetic construct
NAAPPPVTY

SEQ ID NO: 2898 - protein, 9 aa, synthetic construct
NAAYPSVSY

SEQ ID NO: 2899 - protein, 9 aa, synthetic construct
NAEGYVLFY

SEQ ID NO: 2900 - protein, 10 aa, synthetic construct
NAENEFVTIK

SEQ ID NO: 2901 - protein, 9 aa, synthetic construct
NAFDVFAAY

SEQ ID NO: 2902 - protein, 9 aa, synthetic construct
NAFEELVAF

SEQ ID NO: 2903 - protein, 11 aa, synthetic construct
NAFEHGGEFTY

SEQ ID NO: 2904 - protein, 9 aa, synthetic construct
NAFLDDPEF

SEQ ID NO: 2905 - protein, 9 aa, synthetic construct
NAGDFPTEY

SEQ ID NO: 2906 - protein, 10 aa, synthetic construct
NAGPAIVISF

SEQ ID NO: 2907 - protein, 9 aa, synthetic construct
NAGPTTLVY

SEQ ID NO: 2908 - protein, 8 aa, synthetic construct
NAIIEHVR

SEQ ID NO: 2909 - protein, 10 aa, synthetic construct
NAIRETGWAF

SEQ ID NO: 2910 - protein, 9 aa, synthetic construct
NAISVTTSY

SEQ ID NO: 2911 - protein, 9 aa, synthetic construct
NAITLPEEF

SEQ ID NO: 2912 - protein, 9 aa, synthetic construct
NAIVAVISY

SEQ ID NO: 2913 - protein, 10 aa, synthetic construct
NALDAAVLAY

SEQ ID NO: 2914 - protein, 9 aa, synthetic construct
NALDDRISF

SEQ ID NO: 2915 - protein, 9 aa, synthetic construct
NALDLNSVL

SEQ ID NO: 2916 - protein, 10 aa, synthetic construct
NALNEQRVEF

SEQ ID NO: 2917 - protein, 9 aa, synthetic construct
NALPALLIY

SEQ ID NO: 2918 - protein, 9 aa, synthetic construct
NALQEPSSF

SEQ ID NO: 2919 - protein, 9 aa, synthetic construct
NALSAMLAY

SEQ ID NO: 2920 - protein, 10 aa, synthetic construct
NAMDSPLLKY

SEQ ID NO: 2921 - protein, 9 aa, synthetic construct
NAPAAISFL

SEQ ID NO: 2922 - protein, 9 aa, synthetic construct
NAPPSFGTL

SEQ ID NO: 2923 - protein, 9 aa, synthetic construct
NASPVISSV

SEQ ID NO: 2924 - protein, 9 aa, synthetic construct
NATGPDLEF

SEQ ID NO: 2925 - protein, 10 aa, synthetic construct
NAVDALIDSM

SEQ ID NO: 2926 - protein, 9 aa, synthetic construct
NAVDVEGLY

SEQ ID NO: 2927 - protein, 9 aa, synthetic construct
NAVNLAIKY

SEQ ID NO: 2928 - protein, 9 aa, synthetic construct
NAVQISEPL

SEQ ID NO: 2929 - protein, 10 aa, synthetic construct
NAVQISEPLY

SEQ ID NO: 2930 - protein, 9 aa, synthetic construct
NAWNNLEKY

SEQ ID NO: 2931 - protein, 10 aa, synthetic construct
NAYHELAQVY

SEQ ID NO: 2932 - protein, 10 aa, synthetic construct
NAYQELLQHY

SEQ ID NO: 2933 - protein, 9 aa, synthetic construct
NCPIAVTHF

SEQ ID NO: 2934 - protein, 10 aa, synthetic construct
NDMIHAENMR

SEQ ID NO: 2935 - protein, 10 aa, synthetic construct
NDMRQEYEQL

SEQ ID NO: 2936 - protein, 10 aa, synthetic construct
NDPSVQQDIK

SEQ ID NO: 2937 - protein, 9 aa, synthetic construct
NEILSNALK

SEQ ID NO: 2938 - protein, 8 aa, synthetic construct
NELNDLFK

SEQ ID NO: 2939 - protein, 9 aa, synthetic construct
NEYVFRETV

SEQ ID NO: 2940 - protein, 9 aa, synthetic construct
NFDDYTVNL

SEQ ID NO: 2941 - protein, 9 aa, synthetic construct
NFDFTRSYL

SEQ ID NO: 2942 - protein, 9 aa, synthetic construct
NFDKIRVWL

SEQ ID NO: 2943 - protein, 9 aa, synthetic construct
NFDVLDLHF

SEQ ID NO: 2944 - protein, 9 aa, synthetic construct
NFDVTYNWI

SEQ ID NO: 2945 - protein, 9 aa, synthetic construct
NFEAATESF

SEQ ID NO: 2946 - protein, 9 aa, synthetic construct
NGCDVNIEY

SEQ ID NO: 2947 - protein, 9 aa, synthetic construct
NGFGGFGSY

SEQ ID NO: 2948 - protein, 11 aa, synthetic construct
NGGHYTYSENR

SEQ ID NO: 2949 - protein, 9 aa, synthetic construct
NGLTLGGQK

SEQ ID NO: 2950 - protein, 9 aa, synthetic construct
NHINVMVKF

SEQ ID NO: 2951 - protein, 9 aa, synthetic construct
NHPNVIKYY

SEQ ID NO: 2952 - protein, 9 aa, synthetic construct
NIPEAIASY

SEQ ID NO: 2953 - protein, 9 aa, synthetic construct
NIPEIVAVY

SEQ ID NO: 2954 - protein, 9 aa, synthetic construct
NIPLVSDPK

SEQ ID NO: 2955 - protein, 9 aa, synthetic construct
NIPTNLRVL

SEQ ID NO: 2956 - protein, 9 aa, synthetic construct
NIPTWLTEL

SEQ ID NO: 2957 - protein, 9 aa, synthetic construct
NIREIEIDY

SEQ ID NO: 2958 - protein, 11 aa, synthetic construct
NKPDIDAWELR

SEQ ID NO: 2959 - protein, 11 aa, synthetic construct
NLAEQHLGLTK

SEQ ID NO: 2960 - protein, 9 aa, synthetic construct
NLAKCIVSV

SEQ ID NO: 2961 - protein, 9 aa, synthetic construct
NLCPTRIEV

SEQ ID NO: 2962 - protein, 9 aa, synthetic construct
NLDPLTETY

SEQ ID NO: 2963 - protein, 9 aa, synthetic construct
NLDSQRLQY

SEQ ID NO: 2964 - protein, 9 aa, synthetic construct
NLLPKLHIV

SEQ ID NO: 2965 - protein, 10 aa, synthetic construct
NLPDEIYHVY

SEQ ID NO: 2966 - protein, 9 aa, synthetic construct
NLPEDYSSL

SEQ ID NO: 2967 - protein, 9 aa, synthetic construct
NLPIGFLEL

SEQ ID NO: 2968 - protein, 9 aa, synthetic construct
NLPSTGGSL

SEQ ID NO: 2969 - protein, 10 aa, synthetic construct
NLTTDNANIL

SEQ ID NO: 2970 - protein, 9 aa, synthetic construct
NMDLFRSTM

SEQ ID NO: 2971 - protein, 8 aa, synthetic construct
NMLKILAI

SEQ ID NO: 2972 - protein, 8 aa, synthetic construct
NMPNLYQK

SEQ ID NO: 2973 - protein, 10 aa, synthetic construct
NNMRSQYEQL

SEQ ID NO: 2974 - protein, 11 aa, synthetic construct
NPADSISHVAY

SEQ ID NO: 2975 - protein, 9 aa, synthetic construct
NPCEYDLKF

SEQ ID NO: 2976 - protein, 9 aa, synthetic construct
NPDPFVPVL

SEQ ID NO: 2977 - protein, 9 aa, synthetic construct
NPESIYSVF

SEQ ID NO: 2978 - protein, 11 aa, synthetic construct
NPFCEPVFVRY

SEQ ID NO: 2979 - protein, 9 aa, synthetic construct
NPFGLIREF

SEQ ID NO: 2980 - protein, 11 aa, synthetic construct
NPFGSTSGSLF

SEQ ID NO: 2981 - protein, 10 aa, synthetic construct
NPFHWGEVEY

SEQ ID NO: 2982 - protein, 9 aa, synthetic construct
NPIEDDLIF

SEQ ID NO: 2983 - protein, 9 aa, synthetic construct
NPISTVTEL

SEQ ID NO: 2984 - protein, 9 aa, synthetic construct
NPITIFQER

SEQ ID NO: 2985 - protein, 9 aa, synthetic construct
NPITVQTVY

SEQ ID NO: 2986 - protein, 9 aa, synthetic construct
NPLDEQHIF

SEQ ID NO: 2987 - protein, 9 aa, synthetic construct
NPLHLDYVM

SEQ ID NO: 2988 - protein, 11 aa, synthetic construct
NPLICPVCTKY

SEQ ID NO: 2989 - protein, 11 aa, synthetic construct
NPLKGDLANTF

SEQ ID NO: 2990 - protein, 9 aa, synthetic construct
NPLQKDPQY

SEQ ID NO: 2991 - protein, 9 aa, synthetic construct
NPQERTLTL

SEQ ID NO: 2992 - protein, 9 aa, synthetic construct
NPSGVIQDF

SEQ ID NO: 2993 - protein, 9 aa, synthetic construct
NPTDISYVY

SEQ ID NO: 2994 - protein, 9 aa, synthetic construct
NPTDPLLAY

SEQ ID NO: 2995 - protein, 9 aa, synthetic construct
NPVGGLLEY

SEQ ID NO: 2996 - protein, 9 aa, synthetic construct
NPVSWVQTF

SEQ ID NO: 2997 - protein, 10 aa, synthetic construct
NPWSTAIVAF

SEQ ID NO: 2998 - protein, 10 aa, synthetic construct
NPYPGDVTKF

SEQ ID NO: 2999 - protein, 8 aa, synthetic construct
NQIILNKV

SEQ ID NO: 3000 - protein, 8 aa, synthetic construct
NQLSWLSV

SEQ ID NO: 3001 - protein, 8 aa, synthetic construct
NQMLVPVI

SEQ ID NO: 3002 - protein, 9 aa, synthetic construct
NQTPVTLQV

SEQ ID NO: 3003 - protein, 9 aa, synthetic construct
NQYRLIVNV

SEQ ID NO: 3004 - protein, 9 aa, synthetic construct
NRFKGVKYF

SEQ ID NO: 3005 - protein, 9 aa, synthetic construct
NRFPAVNSL

SEQ ID NO: 3006 - protein, 9 aa, synthetic construct
NRLLYSMTF

SEQ ID NO: 3007 - protein, 10 aa, synthetic construct
NRMEPLWTGF

SEQ ID NO: 3008 - protein, 9 aa, synthetic construct
NRPNLYYEV

SEQ ID NO: 3009 - protein, 9 aa, synthetic construct
NRYHVPVVV

SEQ ID NO: 3010 - protein, 9 aa, synthetic construct
NSDVSLLNY

SEQ ID NO: 3011 - protein, 10 aa, synthetic construct
NSGDVNVEIN

SEQ ID NO: 3012 - protein, 10 aa, synthetic construct
NSGHPLVLSY

SEQ ID NO: 3013 - protein, 8 aa, synthetic construct
NSLESYAF

SEQ ID NO: 3014 - protein, 9 aa, synthetic construct
NSPLRENSF

SEQ ID NO: 3015 - protein, 9 aa, synthetic construct
NSSDHVLLY

SEQ ID NO: 3016 - protein, 9 aa, synthetic construct
NSTPILYTI

SEQ ID NO: 3017 - protein, 10 aa, synthetic construct
NSVAASLMSW

SEQ ID NO: 3018 - protein, 9 aa, synthetic construct
NTDFGDEFY

SEQ ID NO: 3019 - protein, 9 aa, synthetic construct
NTDLGNDLY

SEQ ID NO: 3020 - protein, 9 aa, synthetic construct
NTEEEGLKY

SEQ ID NO: 3021 - protein, 9 aa, synthetic construct
NVADVVIKF

SEQ ID NO: 3022 - protein, 9 aa, synthetic construct
NVAEFVCKY

SEQ ID NO: 3023 - protein, 8 aa, synthetic construct
NVEIDPEI

SEQ ID NO: 3024 - protein, 9 aa, synthetic construct
NVIETISSL

SEQ ID NO: 3025 - protein, 10 aa, synthetic construct
NVIEVDSAHY

SEQ ID NO: 3026 - protein, 9 aa, synthetic construct
NVIHNLATY

SEQ ID NO: 3027 - protein, 9 aa, synthetic construct
NVIRDAVTY

SEQ ID NO: 3028 - protein, 9 aa, synthetic construct
NVLDDVYEY

SEQ ID NO: 3029 - protein, 9 aa, synthetic construct
NVLDHFSEL

SEQ ID NO: 3030 - protein, 9 aa, synthetic construct
NVMGEQFSY

SEQ ID NO: 3031 - protein, 9 aa, synthetic construct
NVNVIISTY

SEQ ID NO: 3032 - protein, 8 aa, synthetic construct
NVPISPAL

SEQ ID NO: 3033 - protein, 8 aa, synthetic construct
NVPVGKVL

SEQ ID NO: 3034 - protein, 9 aa, synthetic construct
NVRCESEVF

SEQ ID NO: 3035 - protein, 10 aa, synthetic construct
NVSTGDVNVE

SEQ ID NO: 3036 - protein, 9 aa, synthetic construct
NVTGIVQVY

SEQ ID NO: 3037 - protein, 8 aa, synthetic construct
NVVPTFGK

SEQ ID NO: 3038 - protein, 10 aa, synthetic construct
NVVQLIMDAY

SEQ ID NO: 3039 - protein, 9 aa, synthetic construct
NVWQVNASR

SEQ ID NO: 3040 - protein, 9 aa, synthetic construct
NYDAALRKI

SEQ ID NO: 3041 - protein, 9 aa, synthetic construct
NYDACLQHL

SEQ ID NO: 3042 - protein, 9 aa, synthetic construct
NYDFGPIHM

SEQ ID NO: 3043 - protein, 9 aa, synthetic construct
NYDLALKYF

SEQ ID NO: 3044 - protein, 9 aa, synthetic construct
NYDVEHTIK

SEQ ID NO: 3045 - protein, 11 aa, synthetic construct
NYHLENAGCNK

SEQ ID NO: 3046 - protein, 9 aa, synthetic construct
NYIEFTRIL

SEQ ID NO: 3047 - protein, 9 aa, synthetic construct
NYISGIQTI

SEQ ID NO: 3048 - protein, 9 aa, synthetic construct
NYLDQIAKF

SEQ ID NO: 3049 - protein, 9 aa, synthetic construct
NYNHLMPTR

SEQ ID NO: 3050 - protein, 11 aa, synthetic construct
NYPETLGRLLI

SEQ ID NO: 3051 - protein, 9 aa, synthetic construct
NYVDCYLRL

SEQ ID NO: 3052 - protein, 11 aa, synthetic construct
PAAALASEHSK

SEQ ID NO: 3053 - protein, 9 aa, synthetic construct
PADAHVLQK

SEQ ID NO: 3054 - protein, 8 aa, synthetic construct
PAHLSLIR

SEQ ID NO: 3055 - protein, 10 aa, synthetic construct
PAIAQFSVQK

SEQ ID NO: 3056 - protein, 10 aa, synthetic construct
PATATSVDLR

SEQ ID NO: 3057 - protein, 11 aa, synthetic construct
PAVDPLDSTSR

SEQ ID NO: 3058 - protein, 11 aa, synthetic construct
PAVTQHAPYFK

SEQ ID NO: 3059 - protein, 9 aa, synthetic construct
PDGTLVTVM

SEQ ID NO: 3060 - protein, 10 aa, synthetic construct
PDHPIVETLR

SEQ ID NO: 3061 - protein, 8 aa, synthetic construct
PDKPITQY

SEQ ID NO: 3062 - protein, 8 aa, synthetic construct
PDLTTPLK

SEQ ID NO: 3063 - protein, 10 aa, synthetic construct
PDSSNLIPKL

SEQ ID NO: 3064 - protein, 9 aa, synthetic construct
PDYLGADQR

SEQ ID NO: 3065 - protein, 9 aa, synthetic construct
PEAEQGGAE

SEQ ID NO: 3066 - protein, 10 aa, synthetic construct
PEDLVEVNPK

SEQ ID NO: 3067 - protein, 8 aa, synthetic construct
PEEFVVEK

SEQ ID NO: 3068 - protein, 9 aa, synthetic construct
PEEVSVTVK

SEQ ID NO: 3069 - protein, 8 aa, synthetic construct
PELHLDIK

SEQ ID NO: 3070 - protein, 9 aa, synthetic construct
PETSVLVLR

SEQ ID NO: 3071 - protein, 8 aa, synthetic construct
PFFHSLSE

SEQ ID NO: 3072 - protein, 11 aa, synthetic construct
PFSLQETYEAK

SEQ ID NO: 3073 - protein, 9 aa, synthetic construct
PGAEFAPNK

SEQ ID NO: 3074 - protein, 10 aa, synthetic construct
PGDNVGFNVK

SEQ ID NO: 3075 - protein, 8 aa, synthetic construct
PGDSDIIR

SEQ ID NO: 3076 - protein, 8 aa, synthetic construct
PGEVFINK

SEQ ID NO: 3077 - protein, 9 aa, synthetic construct
PGGIDVHTR

SEQ ID NO: 3078 - protein, 9 aa, synthetic construct
PGKKPPSVF

SEQ ID NO: 3079 - protein, 9 aa, synthetic construct
PGLMLMGFK

SEQ ID NO: 3080 - protein, 10 aa, synthetic construct
PGLSIGDVAK

SEQ ID NO: 3081 - protein, 10 aa, synthetic construct
PGLTDTTVPR

SEQ ID NO: 3082 - protein, 10 aa, synthetic construct
PGMHHPIQMK

SEQ ID NO: 3083 - protein, 8 aa, synthetic construct
PGQFIHTN

SEQ ID NO: 3084 - protein, 11 aa, synthetic construct
PGRPVGLEQLR

SEQ ID NO: 3085 - protein, 9 aa, synthetic construct
PGSLLSLFR

SEQ ID NO: 3086 - protein, 10 aa, synthetic construct
PGYSYTAANK

SEQ ID NO: 3087 - protein, 8 aa, synthetic construct
PHEGLLLR

SEQ ID NO: 3088 - protein, 8 aa, synthetic construct
PHILKEMY

SEQ ID NO: 3089 - protein, 9 aa, synthetic construct
PHLVLDQLR

SEQ ID NO: 3090 - protein, 9 aa, synthetic construct
PHLVTHDAR

SEQ ID NO: 3091 - protein, 8 aa, synthetic construct
PHQPLATY

SEQ ID NO: 3092 - protein, 8 aa, synthetic construct
PIEATATK

SEQ ID NO: 3093 - protein, 8 aa, synthetic construct
PIFLNTID

SEQ ID NO: 3094 - protein, 10 aa, synthetic construct
PILQVLGRGL

SEQ ID NO: 3095 - protein, 9 aa, synthetic construct
PIQEFHLSR

SEQ ID NO: 3096 - protein, 10 aa, synthetic construct
PKPEPIPEPK

SEQ ID NO: 3097 - protein, 10 aa, synthetic construct
PKTAENFRQF

SEQ ID NO: 3098 - protein, 9 aa, synthetic construct
PLADAHLTK

SEQ ID NO: 3099 - protein, 8 aa, synthetic construct
PLEDPGVK

SEQ ID NO: 3100 - protein, 10 aa, synthetic construct
PLHSSGINVN

SEQ ID NO: 3101 - protein, 9 aa, synthetic construct
PLIHQEGNR

SEQ ID NO: 3102 - protein, 8 aa, synthetic construct
PLLPHEVR

SEQ ID NO: 3103 - protein, 9 aa, synthetic construct
PLPHGTHTF

SEQ ID NO: 3104 - protein, 9 aa, synthetic construct
PLSLFQTSH

SEQ ID NO: 3105 - protein, 8 aa, synthetic construct
PLVLNEIR

SEQ ID NO: 3106 - protein, 11 aa, synthetic construct
PMVALYNAENV

SEQ ID NO: 3107 - protein, 8 aa, synthetic construct
PNEIIHAL

SEQ ID NO: 3108 - protein, 8 aa, synthetic construct
PPGTAVLR

SEQ ID NO: 3109 - protein, 8 aa, synthetic construct
PPLSPYFK

SEQ ID NO: 3110 - protein, 9 aa, synthetic construct
PPVSELITK

SEQ ID NO: 3111 - protein, 11 aa, synthetic construct
PPYTVVYFPVR

SEQ ID NO: 3112 - protein, 8 aa, synthetic construct
PQFQFKTI

SEQ ID NO: 3113 - protein, 8 aa, synthetic construct
PQGLALAK

SEQ ID NO: 3114 - protein, 11 aa, synthetic construct
PQVGVAFPHIK

SEQ ID NO: 3115 - protein, 11 aa, synthetic construct
PQYQTWEEFSR

SEQ ID NO: 3116 - protein, 10 aa, synthetic construct
PSEGLMNVLK

SEQ ID NO: 3117 - protein, 11 aa, synthetic construct
PSGTFVQCDAR

SEQ ID NO: 3118 - protein, 9 aa, synthetic construct
PSQHNDIIR

SEQ ID NO: 3119 - protein, 11 aa, synthetic construct
PSVPVALNIGK

SEQ ID NO: 3120 - protein, 8 aa, synthetic construct
PTDFSSAK

SEQ ID NO: 3121 - protein, 9 aa, synthetic construct
PTDPKVVVY

SEQ ID NO: 3122 - protein, 9 aa, synthetic construct
PTFNVTVTK

SEQ ID NO: 3123 - protein, 10 aa, synthetic construct
PTLEEYQHYK

SEQ ID NO: 3124 - protein, 10 aa, synthetic construct
PTTDHIDTEK

SEQ ID NO: 3125 - protein, 8 aa, synthetic construct
PVDEFDGK

SEQ ID NO: 3126 - protein, 8 aa, synthetic construct
PVEGSSGR

SEQ ID NO: 3127 - protein, 11 aa, synthetic construct
PVIAQKQKHTG

SEQ ID NO: 3128 - protein, 11 aa, synthetic construct
PVIIASEGVEK

SEQ ID NO: 3129 - protein, 9 aa, synthetic construct
PVLLAHGER

SEQ ID NO: 3130 - protein, 11 aa, synthetic construct
PVNYYVDTAVR

SEQ ID NO: 3131 - protein, 11 aa, synthetic construct
PVPPLPEYGGK

SEQ ID NO: 3132 - protein, 8 aa, synthetic construct
PVSELITK

SEQ ID NO: 3133 - protein, 9 aa, synthetic construct
PVVIVSAAR

SEQ ID NO: 3134 - protein, 11 aa, synthetic construct
PWSQHYHQGYY

SEQ ID NO: 3135 - protein, 9 aa, synthetic construct
PYLDSFYEY

SEQ ID NO: 3136 - protein, 10 aa, synthetic construct
QAADDTEISF

SEQ ID NO: 3137 - protein, 9 aa, synthetic construct
QAADFAEQF

SEQ ID NO: 3138 - protein, 10 aa, synthetic construct
QAAELIDSEF

SEQ ID NO: 3139 - protein, 9 aa, synthetic construct
QAAVERFVY

SEQ ID NO: 3140 - protein, 9 aa, synthetic construct
QADLINELY

SEQ ID NO: 3141 - protein, 10 aa, synthetic construct
QAFELDQQAF

SEQ ID NO: 3142 - protein, 9 aa, synthetic construct
QAFKFCLQY

SEQ ID NO: 3143 - protein, 9 aa, synthetic construct
QAIDEGWMY

SEQ ID NO: 3144 - protein, 9 aa, synthetic construct
QAIEDMVGY

SEQ ID NO: 3145 - protein, 8 aa, synthetic construct
QAIETHLI

SEQ ID NO: 3146 - protein, 9 aa, synthetic construct
QAITLVTQY

SEQ ID NO: 3147 - protein, 8 aa, synthetic construct
QALEVLKI

SEQ ID NO: 3148 - protein, 9 aa, synthetic construct
QALMAMLVY

SEQ ID NO: 3149 - protein, 9 aa, synthetic construct
QARIEIESF

SEQ ID NO: 3150 - protein, 9 aa, synthetic construct
QASDVSVKY

SEQ ID NO: 3151 - protein, 9 aa, synthetic construct
QASGILPEY

SEQ ID NO: 3152 - protein, 9 aa, synthetic construct
QASIVAEAY

SEQ ID NO: 3153 - protein, 11 aa, synthetic construct
QASQHALRPAP

SEQ ID NO: 3154 - protein, 10 aa, synthetic construct
QASTVVTYVY

SEQ ID NO: 3155 - protein, 9 aa, synthetic construct
QATDSILVF

SEQ ID NO: 3156 - protein, 9 aa, synthetic construct
QATESVSLY

SEQ ID NO: 3157 - protein, 9 aa, synthetic construct
QATRTVPVF

SEQ ID NO: 3158 - protein, 9 aa, synthetic construct
QAVADAVTY

SEQ ID NO: 3159 - protein, 9 aa, synthetic construct
QAVGGGLLY

SEQ ID NO: 3160 - protein, 10 aa, synthetic construct
QAVGGGLLYY

SEQ ID NO: 3161 - protein, 10 aa, synthetic construct
QAVNGLGWYY

SEQ ID NO: 3162 - protein, 9 aa, synthetic construct
QAWDGTTDY

SEQ ID NO: 3163 - protein, 11 aa, synthetic construct
QAWEDVKMTGY

SEQ ID NO: 3164 - protein, 9 aa, synthetic construct
QAYADYIGF

SEQ ID NO: 3165 - protein, 10 aa, synthetic construct
QAYPEYLITY

SEQ ID NO: 3166 - protein, 9 aa, synthetic construct
QCNLEVHVY

SEQ ID NO: 3167 - protein, 8 aa, synthetic construct
QCPHIVRI

SEQ ID NO: 3168 - protein, 8 aa, synthetic construct
QDQDVDVK

SEQ ID NO: 3169 - protein, 9 aa, synthetic construct
QEAAAVLMA

SEQ ID NO: 3170 - protein, 9 aa, synthetic construct
QEAFGFEQA

SEQ ID NO: 3171 - protein, 10 aa, synthetic construct
QEALDAAGDK

SEQ ID NO: 3172 - protein, 9 aa, synthetic construct
QEALSALTA

SEQ ID NO: 3173 - protein, 9 aa, synthetic construct
QEAVAAIEK

SEQ ID NO: 3174 - protein, 10 aa, synthetic construct
QEFAEGFVKA

SEQ ID NO: 3175 - protein, 9 aa, synthetic construct
QEFGLARFK

SEQ ID NO: 3176 - protein, 9 aa, synthetic construct
QEFNRLLEA

SEQ ID NO: 3177 - protein, 10 aa, synthetic construct
QEFPLEAGIS

SEQ ID NO: 3178 - protein, 9 aa, synthetic construct
QEFSFFDKV

SEQ ID NO: 3179 - protein, 9 aa, synthetic construct
QEHLQLQNL

SEQ ID NO: 3180 - protein, 9 aa, synthetic construct
QELFPAPIL

SEQ ID NO: 3181 - protein, 8 aa, synthetic construct
QELKVLEV

SEQ ID NO: 3182 - protein, 9 aa, synthetic construct
QELPLLQLY

SEQ ID NO: 3183 - protein, 8 aa, synthetic construct
QETVLPIK

SEQ ID NO: 3184 - protein, 9 aa, synthetic construct
QEVEPLGLP

SEQ ID NO: 3185 - protein, 10 aa, synthetic construct
QEYLDAIKKF

SEQ ID NO: 3186 - protein, 9 aa, synthetic construct
QEYVTFLGA

SEQ ID NO: 3187 - protein, 8 aa, synthetic construct
QFASFIDK

SEQ ID NO: 3188 - protein, 8 aa, synthetic construct
QFIGVKEI

SEQ ID NO: 3189 - protein, 9 aa, synthetic construct
QFLPRTITL

SEQ ID NO: 3190 - protein, 11 aa, synthetic construct
QGHTNEVNAIK

SEQ ID NO: 3191 - protein, 11 aa, synthetic construct
QGLLHVGDIIK

SEQ ID NO: 3192 - protein, 9 aa, synthetic construct
QGPPVTPVL

SEQ ID NO: 3193 - protein, 9 aa, synthetic construct
QGVEFHYVY

SEQ ID NO: 3194 - protein, 8 aa, synthetic construct
QGYTVARI

SEQ ID NO: 3195 - protein, 9 aa, synthetic construct
QIGPAPPLK

SEQ ID NO: 3196 - protein, 9 aa, synthetic construct
QIPEIKQTL

SEQ ID NO: 3197 - protein, 9 aa, synthetic construct
QISEVVVVK

SEQ ID NO: 3198 - protein, 9 aa, synthetic construct
QIVEILTAY

SEQ ID NO: 3199 - protein, 9 aa, synthetic construct
QIYTYFVYK

SEQ ID NO: 3200 - protein, 9 aa, synthetic construct
QLDTHMELY

SEQ ID NO: 3201 - protein, 10 aa, synthetic construct
QLGLEEGLVP

SEQ ID NO: 3202 - protein, 9 aa, synthetic construct
QLIDLAEEY

SEQ ID NO: 3203 - protein, 9 aa, synthetic construct
QLINNMLDK

SEQ ID NO: 3204 - protein, 10 aa, synthetic construct
QLLGHLLATK

SEQ ID NO: 3205 - protein, 9 aa, synthetic construct
QLMEQVAQL

SEQ ID NO: 3206 - protein, 10 aa, synthetic construct
QLPQLPLAAL

SEQ ID NO: 3207 - protein, 11 aa, synthetic construct
QLQLQAASNFK

SEQ ID NO: 3208 - protein, 9 aa, synthetic construct
QLYDKGLVY

SEQ ID NO: 3209 - protein, 9 aa, synthetic construct
QLYSTILSH

SEQ ID NO: 3210 - protein, 9 aa, synthetic construct
QMCGLHIVV

SEQ ID NO: 3211 - protein, 9 aa, synthetic construct
QMLTRILVI

SEQ ID NO: 3212 - protein, 8 aa, synthetic construct
QMPTVIYV

SEQ ID NO: 3213 - protein, 8 aa, synthetic construct
QNIEIPEI

SEQ ID NO: 3214 - protein, 11 aa, synthetic construct
QPAENISKDLY

SEQ ID NO: 3215 - protein, 9 aa, synthetic construct
QPAPCPLNY

SEQ ID NO: 3216 - protein, 9 aa, synthetic construct
QPAPISPHL

SEQ ID NO: 3217 - protein, 10 aa, synthetic construct
QPAQDIFSVY

SEQ ID NO: 3218 - protein, 10 aa, synthetic construct
QPCHVIYTDY

SEQ ID NO: 3219 - protein, 9 aa, synthetic construct
QPDNIVYVM

SEQ ID NO: 3220 - protein, 10 aa, synthetic construct
QPDPDAIKMF

SEQ ID NO: 3221 - protein, 9 aa, synthetic construct
QPFDIISDF

SEQ ID NO: 3222 - protein, 11 aa, synthetic construct
QPFDIISDFVF

SEQ ID NO: 3223 - protein, 9 aa, synthetic construct
QPFREAIAL

SEQ ID NO: 3224 - protein, 9 aa, synthetic construct
QPGTTILQY

SEQ ID NO: 3225 - protein, 9 aa, synthetic construct
QPIAPQTTF

SEQ ID NO: 3226 - protein, 9 aa, synthetic construct
QPILYSYSF

SEQ ID NO: 3227 - protein, 10 aa, synthetic construct
QPLLDNQVGF

SEQ ID NO: 3228 - protein, 9 aa, synthetic construct
QPMPNPVAY

SEQ ID NO: 3229 - protein, 9 aa, synthetic construct
QPMPYLTTY

SEQ ID NO: 3230 - protein, 9 aa, synthetic construct
QPPAVEIPY

SEQ ID NO: 3231 - protein, 10 aa, synthetic construct
QPPVSPGTAL

SEQ ID NO: 3232 - protein, 9 aa, synthetic construct
QPQDESLVY

SEQ ID NO: 3233 - protein, 10 aa, synthetic construct
QPQHPLHVTY

SEQ ID NO: 3234 - protein, 9 aa, synthetic construct
QPRPEAVQF

SEQ ID NO: 3235 - protein, 9 aa, synthetic construct
QPSAIIVTL

SEQ ID NO: 3236 - protein, 10 aa, synthetic construct
QPSDPLELVM

SEQ ID NO: 3237 - protein, 9 aa, synthetic construct
QPSENLISY

SEQ ID NO: 3238 - protein, 9 aa, synthetic construct
QPSPLPVHY

SEQ ID NO: 3239 - protein, 10 aa, synthetic construct
QPTEEKVDCI

SEQ ID NO: 3240 - protein, 9 aa, synthetic construct
QPTVTIKVY

SEQ ID NO: 3241 - protein, 9 aa, synthetic construct
QPVDWFVVY

SEQ ID NO: 3242 - protein, 11 aa, synthetic construct
QPVEFNHAINY

SEQ ID NO: 3243 - protein, 10 aa, synthetic construct
QPWEEIKTSY

SEQ ID NO: 3244 - protein, 9 aa, synthetic construct
QQHLYRVNI

SEQ ID NO: 3245 - protein, 8 aa, synthetic construct
QQIKLWKV

SEQ ID NO: 3246 - protein, 8 aa, synthetic construct
QQIKVATL

SEQ ID NO: 3247 - protein, 8 aa, synthetic construct
QQIKVVTI

SEQ ID NO: 3248 - protein, 8 aa, synthetic construct
QQIRINEV

SEQ ID NO: 3249 - protein, 8 aa, synthetic construct
QQIRVLLM

SEQ ID NO: 3250 - protein, 8 aa, synthetic construct
QQISILTV

SEQ ID NO: 3251 - protein, 8 aa, synthetic construct
QQITQTEV

SEQ ID NO: 3252 - protein, 8 aa, synthetic construct
QQLVLRTV

SEQ ID NO: 3253 - protein, 8 aa, synthetic construct
QQQVIRKI

SEQ ID NO: 3254 - protein, 9 aa, synthetic construct
QQRLFLQFV

SEQ ID NO: 3255 - protein, 9 aa, synthetic construct
QQRLVVVSV

SEQ ID NO: 3256 - protein, 9 aa, synthetic construct
QQSIERLLV

SEQ ID NO: 3257 - protein, 8 aa, synthetic construct
QQVEVYKI

SEQ ID NO: 3258 - protein, 8 aa, synthetic construct
QQVFIQKV

SEQ ID NO: 3259 - protein, 9 aa, synthetic construct
QQYKFSRQV

SEQ ID NO: 3260 - protein, 11 aa, synthetic construct
QRFDARQKIGL

SEQ ID NO: 3261 - protein, 9 aa, synthetic construct
QRFESYYNY

SEQ ID NO: 3262 - protein, 9 aa, synthetic construct
QRFLEVQYL

SEQ ID NO: 3263 - protein, 11 aa, synthetic construct
QRFQLPGNIGF

SEQ ID NO: 3264 - protein, 9 aa, synthetic construct
QRKLTLERF

SEQ ID NO: 3265 - protein, 9 aa, synthetic construct
QRKQIFSRL

SEQ ID NO: 3266 - protein, 9 aa, synthetic construct
QRLGAKLGF

SEQ ID NO: 3267 - protein, 9 aa, synthetic construct
QRLQLCYQL

SEQ ID NO: 3268 - protein, 9 aa, synthetic construct
QRMNFLVTL

SEQ ID NO: 3269 - protein, 9 aa, synthetic construct
QRNLFILAY

SEQ ID NO: 3270 - protein, 9 aa, synthetic construct
QRNLYIAGF

SEQ ID NO: 3271 - protein, 9 aa, synthetic construct
QRQPYFIYF

SEQ ID NO: 3272 - protein, 11 aa, synthetic construct
QRSLINSNVGF

SEQ ID NO: 3273 - protein, 9 aa, synthetic construct
QRTSLIVHV

SEQ ID NO: 3274 - protein, 9 aa, synthetic construct
QRTVITEEF

SEQ ID NO: 3275 - protein, 9 aa, synthetic construct
QRVLLLVGF

SEQ ID NO: 3276 - protein, 9 aa, synthetic construct
QRVPINESF

SEQ ID NO: 3277 - protein, 9 aa, synthetic construct
QRVSIFFDY

SEQ ID NO: 3278 - protein, 10 aa, synthetic construct
QRYDSVINRL

SEQ ID NO: 3279 - protein, 9 aa, synthetic construct
QRYKLGVRL

SEQ ID NO: 3280 - protein, 9 aa, synthetic construct
QRYNTILQM

SEQ ID NO: 3281 - protein, 9 aa, synthetic construct
QSCGTYLRV

SEQ ID NO: 3282 - protein, 9 aa, synthetic construct
QSDYYASYY

SEQ ID NO: 3283 - protein, 8 aa, synthetic construct
QSKITRLI

SEQ ID NO: 3284 - protein, 10 aa, synthetic construct
QSKYEELQIT

SEQ ID NO: 3285 - protein, 9 aa, synthetic construct
QSYIFPSSI

SEQ ID NO: 3286 - protein, 9 aa, synthetic construct
QSYPTPVTV

SEQ ID NO: 3287 - protein, 11 aa, synthetic construct
QTDIQGALSAY

SEQ ID NO: 3288 - protein, 9 aa, synthetic construct
QTDKLKELY

SEQ ID NO: 3289 - protein, 9 aa, synthetic construct
QTDPVTLQY

SEQ ID NO: 3290 - protein, 9 aa, synthetic construct
QTEASALLY

SEQ ID NO: 3291 - protein, 9 aa, synthetic construct
QTIDFSSNF

SEQ ID NO: 3292 - protein, 10 aa, synthetic construct
QTPDFTPTKY

SEQ ID NO: 3293 - protein, 8 aa, synthetic construct
QTPKVLVV

SEQ ID NO: 3294 - protein, 9 aa, synthetic construct
QVAEIVSKY

SEQ ID NO: 3295 - protein, 9 aa, synthetic construct
QVAPLTHVF

SEQ ID NO: 3296 - protein, 8 aa, synthetic construct
QVIEISEY

SEQ ID NO: 3297 - protein, 8 aa, synthetic construct
QVIKLHEV

SEQ ID NO: 3298 - protein, 9 aa, synthetic construct
QVPASFSSL

SEQ ID NO: 3299 - protein, 9 aa, synthetic construct
QVRATVLLL

SEQ ID NO: 3300 - protein, 9 aa, synthetic construct
QVVVATVAF

SEQ ID NO: 3301 - protein, 9 aa, synthetic construct
QWDVDTIYL

SEQ ID NO: 3302 - protein, 10 aa, synthetic construct
QWEDLTPLTF

SEQ ID NO: 3303 - protein, 11 aa, synthetic construct
QYLAYVASSHK

SEQ ID NO: 3304 - protein, 9 aa, synthetic construct
QYSNNIRQL

SEQ ID NO: 3305 - protein, 9 aa, synthetic construct
RAAPFSLEY

SEQ ID NO: 3306 - protein, 11 aa, synthetic construct
RAFDQGADAIY

SEQ ID NO: 3307 - protein, 10 aa, synthetic construct
RAIEDPILAY

SEQ ID NO: 3308 - protein, 9 aa, synthetic construct
REAFGFEQA

SEQ ID NO: 3309 - protein, 9 aa, synthetic construct
REAQKFALA

SEQ ID NO: 3310 - protein, 9 aa, synthetic construct
RECPSVLEY

SEQ ID NO: 3311 - protein, 10 aa, synthetic construct
REFDAFVETL

SEQ ID NO: 3312 - protein, 10 aa, synthetic construct
REFESAIVEA

SEQ ID NO: 3313 - protein, 11 aa, synthetic construct
REFLWQEGHSA

SEQ ID NO: 3314 - protein, 10 aa, synthetic construct
REFSDFIQAV

SEQ ID NO: 3315 - protein, 9 aa, synthetic construct
REFVSGLSA

SEQ ID NO: 3316 - protein, 10 aa, synthetic construct
REGPPFISEA

SEQ ID NO: 3317 - protein, 9 aa, synthetic construct
REHAPFLVA

SEQ ID NO: 3318 - protein, 9 aa, synthetic construct
REHPVPLLP

SEQ ID NO: 3319 - protein, 10 aa, synthetic construct
REHQFYETLP

SEQ ID NO: 3320 - protein, 10 aa, synthetic construct
REIAEAYETL

SEQ ID NO: 3321 - protein, 10 aa, synthetic construct
REIQEAIAVA

SEQ ID NO: 3322 - protein, 11 aa, synthetic construct
REITFENGEEL

SEQ ID NO: 3323 - protein, 9 aa, synthetic construct
REIWNQISA

SEQ ID NO: 3324 - protein, 9 aa, synthetic construct
REKMFVEEV

SEQ ID NO: 3325 - protein, 10 aa, synthetic construct
RELDPSLVSA

SEQ ID NO: 3326 - protein, 10 aa, synthetic construct
RELLIIGGVA

SEQ ID NO: 3327 - protein, 11 aa, synthetic construct
RELLIIGGVAA

SEQ ID NO: 3328 - protein, 9 aa, synthetic construct
RELPHFTEA

SEQ ID NO: 3329 - protein, 9 aa, synthetic construct
REMEENFAV

SEQ ID NO: 3330 - protein, 11 aa, synthetic construct
REMEENFAVEA

SEQ ID NO: 3331 - protein, 9 aa, synthetic construct
REMTILGSA

SEQ ID NO: 3332 - protein, 9 aa, synthetic construct
RESNIHLIP

SEQ ID NO: 3333 - protein, 9 aa, synthetic construct
REVVETPLL

SEQ ID NO: 3334 - protein, 10 aa, synthetic construct
REYEHYWTEL

SEQ ID NO: 3335 - protein, 10 aa, synthetic construct
REYEIEFIYA

SEQ ID NO: 3336 - protein, 11 aa, synthetic construct
REYEIPSNLTP

SEQ ID NO: 3337 - protein, 10 aa, synthetic construct
REYGVPFLET

SEQ ID NO: 3338 - protein, 9 aa, synthetic construct
REYMGFIQA

SEQ ID NO: 3339 - protein, 10 aa, synthetic construct
REYMGFIQAM

SEQ ID NO: 3340 - protein, 10 aa, synthetic construct
REYTEGLTEA

SEQ ID NO: 3341 - protein, 9 aa, synthetic construct
REYWNEQSA

SEQ ID NO: 3342 - protein, 9 aa, synthetic construct
RFDVHDVTL

SEQ ID NO: 3343 - protein, 9 aa, synthetic construct
RFLDKALEL

SEQ ID NO: 3344 - protein, 10 aa, synthetic construct
RFQSSAVMAL

SEQ ID NO: 3345 - protein, 10 aa, synthetic construct
RFSDISSTTF

SEQ ID NO: 3346 - protein, 9 aa, synthetic construct
RGSDVIIML

SEQ ID NO: 3347 - protein, 9 aa, synthetic construct
RICEILLQY

SEQ ID NO: 3348 - protein, 9 aa, synthetic construct
RIKLGDYHF

SEQ ID NO: 3349 - protein, 9 aa, synthetic construct
RILSGVVTK

SEQ ID NO: 3350 - protein, 11 aa, synthetic construct
RIMDPDVITGY

SEQ ID NO: 3351 - protein, 10 aa, synthetic construct
RIPEFNMAAF

SEQ ID NO: 3352 - protein, 9 aa, synthetic construct
RIPSFVTEL

SEQ ID NO: 3353 - protein, 9 aa, synthetic construct
RITPSYVAF

SEQ ID NO: 3354 - protein, 10 aa, synthetic construct
RLDELGGVYL

SEQ ID NO: 3355 - protein, 10 aa, synthetic construct
RLDPSDAKFV

SEQ ID NO: 3356 - protein, 9 aa, synthetic construct
RLFGTTVTF

SEQ ID NO: 3357 - protein, 9 aa, synthetic construct
RLFPLIQAM

SEQ ID NO: 3358 - protein, 9 aa, synthetic construct
RLFVGSIPK

SEQ ID NO: 3359 - protein, 9 aa, synthetic construct
RLHEVLTEV

SEQ ID NO: 3360 - protein, 9 aa, synthetic construct
RLINQVLEL

SEQ ID NO: 3361 - protein, 10 aa, synthetic construct
RLISQIVSSI

SEQ ID NO: 3362 - protein, 9 aa, synthetic construct
RLPAWQPIL

SEQ ID NO: 3363 - protein, 9 aa, synthetic construct
RLPDLIKEV

SEQ ID NO: 3364 - protein, 10 aa, synthetic construct
RLPNVPSSSL

SEQ ID NO: 3365 - protein, 9 aa, synthetic construct
RLPPLLSPL

SEQ ID NO: 3366 - protein, 9 aa, synthetic construct
RMDNIYFEY

SEQ ID NO: 3367 - protein, 9 aa, synthetic construct
RMDYPVFTV

SEQ ID NO: 3368 - protein, 9 aa, synthetic construct
RMFDGKFVV

SEQ ID NO: 3369 - protein, 9 aa, synthetic construct
RMITAMNTI

SEQ ID NO: 3370 - protein, 11 aa, synthetic construct
RNVSTGDVNVE

SEQ ID NO: 3371 - protein, 9 aa, synthetic construct
RPAANPIQF

SEQ ID NO: 3372 - protein, 9 aa, synthetic construct
RPAPVEVSY

SEQ ID NO: 3373 - protein, 9 aa, synthetic construct
RPAPVEVTY

SEQ ID NO: 3374 - protein, 9 aa, synthetic construct
RPEDLPIKY

SEQ ID NO: 3375 - protein, 11 aa, synthetic construct
RPFASGANFEY

SEQ ID NO: 3376 - protein, 9 aa, synthetic construct
RPILTIITL

SEQ ID NO: 3377 - protein, 9 aa, synthetic construct
RPITVSYAF

SEQ ID NO: 3378 - protein, 9 aa, synthetic construct
RPLPAQDLF

SEQ ID NO: 3379 - protein, 11 aa, synthetic construct
RPPSTPEGIAL

SEQ ID NO: 3380 - protein, 9 aa, synthetic construct
RPSVLIVTY

SEQ ID NO: 3381 - protein, 10 aa, synthetic construct
RPVELPEVEY

SEQ ID NO: 3382 - protein, 10 aa, synthetic construct
RPVHLDQAAF

SEQ ID NO: 3383 - protein, 10 aa, synthetic construct
RPVIGSSVTY

SEQ ID NO: 3384 - protein, 11 aa, synthetic construct
RPVMDVAFVQF

SEQ ID NO: 3385 - protein, 9 aa, synthetic construct
RPVPLEQTY

SEQ ID NO: 3386 - protein, 11 aa, synthetic construct
RPVPPEVAQQY

SEQ ID NO: 3387 - protein, 10 aa, synthetic construct
RQFEFSVDSF

SEQ ID NO: 3388 - protein, 9 aa, synthetic construct
RQFLLKSLI

SEQ ID NO: 3389 - protein, 11 aa, synthetic construct
RQGVDADINGL

SEQ ID NO: 3390 - protein, 9 aa, synthetic construct
RQINWTVLY

SEQ ID NO: 3391 - protein, 9 aa, synthetic construct
RQKAVSLFL

SEQ ID NO: 3392 - protein, 10 aa, synthetic construct
RQLEDILSTY

SEQ ID NO: 3393 - protein, 11 aa, synthetic construct
RQLEEEGITFV

SEQ ID NO: 3394 - protein, 8 aa, synthetic construct
RQLKLPQI

SEQ ID NO: 3395 - protein, 8 aa, synthetic construct
RQLLVRTL

SEQ ID NO: 3396 - protein, 8 aa, synthetic construct
RQMVFNEI

SEQ ID NO: 3397 - protein, 9 aa, synthetic construct
RQSLEGLSV

SEQ ID NO: 3398 - protein, 8 aa, synthetic construct
RQVLIRQI

SEQ ID NO: 3399 - protein, 8 aa, synthetic construct
RQWLIDQI

SEQ ID NO: 3400 - protein, 9 aa, synthetic construct
RQYLAINQI

SEQ ID NO: 3401 - protein, 8 aa, synthetic construct
RQYMFSSL

SEQ ID NO: 3402 - protein, 9 aa, synthetic construct
RRFDPKLFL

SEQ ID NO: 3403 - protein, 10 aa, synthetic construct
RRFGTVLTEH

SEQ ID NO: 3404 - protein, 9 aa, synthetic construct
RRFNYVVKL

SEQ ID NO: 3405 - protein, 11 aa, synthetic construct
RRGDLPFVVPR

SEQ ID NO: 3406 - protein, 9 aa, synthetic construct
RRLDIVRSL

SEQ ID NO: 3407 - protein, 9 aa, synthetic construct
RRNPEPLRF

SEQ ID NO: 3408 - protein, 10 aa, synthetic construct
RRSGLLPATF

SEQ ID NO: 3409 - protein, 9 aa, synthetic construct
RRSVAELRL

SEQ ID NO: 3410 - protein, 11 aa, synthetic construct
RRVFLKAGASF

SEQ ID NO: 3411 - protein, 11 aa, synthetic construct
RRVLQALEGLK

SEQ ID NO: 3412 - protein, 11 aa, synthetic construct
RRYIDPSGFVK

SEQ ID NO: 3413 - protein, 9 aa, synthetic construct
RSDTPLIYK

SEQ ID NO: 3414 - protein, 9 aa, synthetic construct
RSLDNFFAK

SEQ ID NO: 3415 - protein, 9 aa, synthetic construct
RSPEEVTEL

SEQ ID NO: 3416 - protein, 9 aa, synthetic construct
RTEEALQLY

SEQ ID NO: 3417 - protein, 10 aa, synthetic construct
RTILVDNNTW

SEQ ID NO: 3418 - protein, 11 aa, synthetic construct
RTQMPDPKTFK

SEQ ID NO: 3419 - protein, 9 aa, synthetic construct
RVPCGFAAM

SEQ ID NO: 3420 - protein, 9 aa, synthetic construct
RVTDEILHL

SEQ ID NO: 3421 - protein, 9 aa, synthetic construct
RVYGGCLCY

SEQ ID NO: 3422 - protein, 9 aa, synthetic construct
RYDLGGLVM

SEQ ID NO: 3423 - protein, 9 aa, synthetic construct
RYIANTVEL

SEQ ID NO: 3424 - protein, 8 aa, synthetic construct
RYIHILMI

SEQ ID NO: 3425 - protein, 9 aa, synthetic construct
RYLPQCSYF

SEQ ID NO: 3426 - protein, 9 aa, synthetic construct
RYLQTLTTI

SEQ ID NO: 3427 - protein, 9 aa, synthetic construct
RYQGVNLYI

SEQ ID NO: 3428 - protein, 9 aa, synthetic construct
RYVEIVSQF

SEQ ID NO: 3429 - protein, 11 aa, synthetic construct
SAAEAGGVFHR

SEQ ID NO: 3430 - protein, 9 aa, synthetic construct
SAAELVDAF

SEQ ID NO: 3431 - protein, 9 aa, synthetic construct
SAAFPGASL

SEQ ID NO: 3432 - protein, 9 aa, synthetic construct
SAAGVSVAF

SEQ ID NO: 3433 - protein, 9 aa, synthetic construct
SAAHFVMFF

SEQ ID NO: 3434 - protein, 9 aa, synthetic construct
SAAMVFSAL

SEQ ID NO: 3435 - protein, 9 aa, synthetic construct
SAANIQPIF

SEQ ID NO: 3436 - protein, 9 aa, synthetic construct
SAAPFFVLF

SEQ ID NO: 3437 - protein, 10 aa, synthetic construct
SAASIEGYYY

SEQ ID NO: 3438 - protein, 9 aa, synthetic construct
SAASVVSEI

SEQ ID NO: 3439 - protein, 11 aa, synthetic construct
SADVPLVVEYK

SEQ ID NO: 3440 - protein, 9 aa, synthetic construct
SAFEATQYF

SEQ ID NO: 3441 - protein, 9 aa, synthetic construct
SAFGLPIVF

SEQ ID NO: 3442 - protein, 9 aa, synthetic construct
SAFGVIIEK

SEQ ID NO: 3443 - protein, 9 aa, synthetic construct
SAFIETTSY

SEQ ID NO: 3444 - protein, 9 aa, synthetic construct
SAFPFLQEY

SEQ ID NO: 3445 - protein, 9 aa, synthetic construct
SAFPFPVTV

SEQ ID NO: 3446 - protein, 9 aa, synthetic construct
SAFPSNIFY

SEQ ID NO: 3447 - protein, 11 aa, synthetic construct
SAFTEEQAVLY

SEQ ID NO: 3448 - protein, 10 aa, synthetic construct
SAHLQWMVVR

SEQ ID NO: 3449 - protein, 9 aa, synthetic construct
SAIAEPSSL

SEQ ID NO: 3450 - protein, 9 aa, synthetic construct
SAIDRIFTL

SEQ ID NO: 3451 - protein, 9 aa, synthetic construct
SAIPSTPSI

SEQ ID NO: 3452 - protein, 9 aa, synthetic construct
SALHIAIEK

SEQ ID NO: 3453 - protein, 8 aa, synthetic construct
SALHPLPA

SEQ ID NO: 3454 - protein, 9 aa, synthetic construct
SALPTVVAY

SEQ ID NO: 3455 - protein, 9 aa, synthetic construct
SAPDNVLEV

SEQ ID NO: 3456 - protein, 9 aa, synthetic construct
SAPDPVSTL

SEQ ID NO: 3457 - protein, 9 aa, synthetic construct
SAPGPGLLL

SEQ ID NO: 3458 - protein, 9 aa, synthetic construct
SAPGTTMFL

SEQ ID NO: 3459 - protein, 9 aa, synthetic construct
SAPIFTTSL

SEQ ID NO: 3460 - protein, 9 aa, synthetic construct
SAPKIFQAL

SEQ ID NO: 3461 - protein, 9 aa, synthetic construct
SAPNTITVL

SEQ ID NO: 3462 - protein, 9 aa, synthetic construct
SAPVAAEPF

SEQ ID NO: 3463 - protein, 9 aa, synthetic construct
SAPVPASPL

SEQ ID NO: 3464 - protein, 9 aa, synthetic construct
SASALAVAL

SEQ ID NO: 3465 - protein, 10 aa, synthetic construct
SASEVTSTVY

SEQ ID NO: 3466 - protein, 9 aa, synthetic construct
SASRLVLNY

SEQ ID NO: 3467 - protein, 11 aa, synthetic construct
SASSLLEQRPK

SEQ ID NO: 3468 - protein, 9 aa, synthetic construct
SATAVAQLY

SEQ ID NO: 3469 - protein, 9 aa, synthetic construct
SATELFEAY

SEQ ID NO: 3470 - protein, 9 aa, synthetic construct
SATETCYTY

SEQ ID NO: 3471 - protein, 9 aa, synthetic construct
SATLVDEVF

SEQ ID NO: 3472 - protein, 9 aa, synthetic construct
SATNVTCYY

SEQ ID NO: 3473 - protein, 9 aa, synthetic construct
SATYIAEEY

SEQ ID NO: 3474 - protein, 9 aa, synthetic construct
SAVDFIRTL

SEQ ID NO: 3475 - protein, 9 aa, synthetic construct
SAVDVHINM

SEQ ID NO: 3476 - protein, 9 aa, synthetic construct
SAVELVQEF

SEQ ID NO: 3477 - protein, 9 aa, synthetic construct
SAVGHVFSL

SEQ ID NO: 3478 - protein, 9 aa, synthetic construct
SAWGDPNSY

SEQ ID NO: 3479 - protein, 9 aa, synthetic construct
SCDPYTLAY

SEQ ID NO: 3480 - protein, 9 aa, synthetic construct
SCFQYAIQK

SEQ ID NO: 3481 - protein, 9 aa, synthetic construct
SCIEPGLFK

SEQ ID NO: 3482 - protein, 9 aa, synthetic construct
SCPFFETSA

SEQ ID NO: 3483 - protein, 9 aa, synthetic construct
SCRQFSSSY

SEQ ID NO: 3484 - protein, 11 aa, synthetic construct
SDKPDMAEIEK

SEQ ID NO: 3485 - protein, 10 aa, synthetic construct
SDLALHFLNK

SEQ ID NO: 3486 - protein, 10 aa, synthetic construct
SDLAQHYLMR

SEQ ID NO: 3487 - protein, 9 aa, synthetic construct
SDPFVEAEK

SEQ ID NO: 3488 - protein, 9 aa, synthetic construct
SDSVLVDIK

SEQ ID NO: 3489 - protein, 9 aa, synthetic construct
SEAEIFTTL

SEQ ID NO: 3490 - protein, 10 aa, synthetic construct
SEAFATVVTA

SEQ ID NO: 3491 - protein, 8 aa, synthetic construct
SEAIFLEA

SEQ ID NO: 3492 - protein, 9 aa, synthetic construct
SEAKGLVTL

SEQ ID NO: 3493 - protein, 9 aa, synthetic construct
SEAPEAPLL

SEQ ID NO: 3494 - protein, 9 aa, synthetic construct
SEASFTLTA

SEQ ID NO: 3495 - protein, 10 aa, synthetic construct
SEASFTLTAA

SEQ ID NO: 3496 - protein, 9 aa, synthetic construct
SEEITNIEL

SEQ ID NO: 3497 - protein, 9 aa, synthetic construct
SEEPFVVKL

SEQ ID NO: 3498 - protein, 9 aa, synthetic construct
SEEVIWEVL

SEQ ID NO: 3499 - protein, 9 aa, synthetic construct
SEFISFITS

SEQ ID NO: 3500 - protein, 10 aa, synthetic construct
SEFKGDLETL

SEQ ID NO: 3501 - protein, 9 aa, synthetic construct
SEFMFEKAP

SEQ ID NO: 3502 - protein, 9 aa, synthetic construct
SEFMKWKEA

SEQ ID NO: 3503 - protein, 9 aa, synthetic construct
SEFSSVLAA

SEQ ID NO: 3504 - protein, 9 aa, synthetic construct
SEGFSIHTR

SEQ ID NO: 3505 - protein, 9 aa, synthetic construct
SEIAFHTIP

SEQ ID NO: 3506 - protein, 9 aa, synthetic construct
SEILDGNQL

SEQ ID NO: 3507 - protein, 9 aa, synthetic construct
SEILYSAPP

SEQ ID NO: 3508 - protein, 9 aa, synthetic construct
SEITGLSTA

SEQ ID NO: 3509 - protein, 9 aa, synthetic construct
SEKPYILEA

SEQ ID NO: 3510 - protein, 9 aa, synthetic construct
SELAGLLSA

SEQ ID NO: 3511 - protein, 10 aa, synthetic construct
SELEKTFNLP

SEQ ID NO: 3512 - protein, 9 aa, synthetic construct
SELKETVEL

SEQ ID NO: 3513 - protein, 9 aa, synthetic construct
SELQLSVSA

SEQ ID NO: 3514 - protein, 9 aa, synthetic construct
SEMFLSVEA

SEQ ID NO: 3515 - protein, 9 aa, synthetic construct
SENAFDLEA

SEQ ID NO: 3516 - protein, 9 aa, synthetic construct
SENKAFISV

SEQ ID NO: 3517 - protein, 9 aa, synthetic construct
SEQRLLIVL

SEQ ID NO: 3518 - protein, 9 aa, synthetic construct
SESGIQMVP

SEQ ID NO: 3519 - protein, 9 aa, synthetic construct
SESLPVRTL

SEQ ID NO: 3520 - protein, 9 aa, synthetic construct
SESRFFVSS

SEQ ID NO: 3521 - protein, 9 aa, synthetic construct
SETSNWIAA

SEQ ID NO: 3522 - protein, 9 aa, synthetic construct
SEVQDRVML

SEQ ID NO: 3523 - protein, 10 aa, synthetic construct
SEVQIALNEA

SEQ ID NO: 3524 - protein, 9 aa, synthetic construct
SEVVSTITA

SEQ ID NO: 3525 - protein, 9 aa, synthetic construct
SEWDGIVTV

SEQ ID NO: 3526 - protein, 9 aa, synthetic construct
SEYEMSIAA

SEQ ID NO: 3527 - protein, 10 aa, synthetic construct
SEYNFEDLSA

SEQ ID NO: 3528 - protein, 9 aa, synthetic construct
SEYQRFAVM

SEQ ID NO: 3529 - protein, 9 aa, synthetic construct
SEYSGFVNP

SEQ ID NO: 3530 - protein, 9 aa, synthetic construct
SFDAHLTEL

SEQ ID NO: 3531 - protein, 9 aa, synthetic construct
SFDATGSGF

SEQ ID NO: 3532 - protein, 9 aa, synthetic construct
SFDATTCIW

SEQ ID NO: 3533 - protein, 9 aa, synthetic construct
SFDDLIACV

SEQ ID NO: 3534 - protein, 9 aa, synthetic construct
SFDLAKVLL

SEQ ID NO: 3535 - protein, 9 aa, synthetic construct
SFDLLPREF

SEQ ID NO: 3536 - protein, 9 aa, synthetic construct
SFDSALQSV

SEQ ID NO: 3537 - protein, 9 aa, synthetic construct
SFDSVPVSL

SEQ ID NO: 3538 - protein, 9 aa, synthetic construct
SFITSSWTF

SEQ ID NO: 3539 - protein, 9 aa, synthetic construct
SFYEHIITV

SEQ ID NO: 3540 - protein, 9 aa, synthetic construct
SGDIIIADY

SEQ ID NO: 3541 - protein, 9 aa, synthetic construct
SGFDGIYTY

SEQ ID NO: 3542 - protein, 9 aa, synthetic construct
SGHIDLDNR

SEQ ID NO: 3543 - protein, 8 aa, synthetic construct
SGIGTDEK

SEQ ID NO: 3544 - protein, 9 aa, synthetic construct
SGLLEELAR

SEQ ID NO: 3545 - protein, 9 aa, synthetic construct
SGLVSTGLK

SEQ ID NO: 3546 - protein, 11 aa, synthetic construct
SGPPVSELITK

SEQ ID NO: 3547 - protein, 9 aa, synthetic construct
SGPVPGTAI

SEQ ID NO: 3548 - protein, 10 aa, synthetic construct
SHALVAGIDR

SEQ ID NO: 3549 - protein, 11 aa, synthetic construct
SHTILLVQPTK

SEQ ID NO: 3550 - protein, 8 aa, synthetic construct
SHVIIGLK

SEQ ID NO: 3551 - protein, 11 aa, synthetic construct
SHVIVDEIHER

SEQ ID NO: 3552 - protein, 9 aa, synthetic construct
SIAAATSAL

SEQ ID NO: 3553 - protein, 10 aa, synthetic construct
SICTSCIVQV

SEQ ID NO: 3554 - protein, 9 aa, synthetic construct
SIDSEPALV

SEQ ID NO: 3555 - protein, 9 aa, synthetic construct
SIDSLQLGY

SEQ ID NO: 3556 - protein, 10 aa, synthetic construct
SIFDGRVVAK

SEQ ID NO: 3557 - protein, 11 aa, synthetic construct
SIFIGGSFILK

SEQ ID NO: 3558 - protein, 9 aa, synthetic construct
SIFSGAASL

SEQ ID NO: 3559 - protein, 9 aa, synthetic construct
SIFSKFTSK

SEQ ID NO: 3560 - protein, 9 aa, synthetic construct
SIINHIRIL

SEQ ID NO: 3561 - protein, 11 aa, synthetic construct
SIIPRGSLSLK

SEQ ID NO: 3562 - protein, 9 aa, synthetic construct
SILDTIFHK

SEQ ID NO: 3563 - protein, 9 aa, synthetic construct
SIPDVNVNL

SEQ ID NO: 3564 - protein, 9 aa, synthetic construct
SIQTSVNAL

SEQ ID NO: 3565 - protein, 8 aa, synthetic construct
SISPTALN

SEQ ID NO: 3566 - protein, 9 aa, synthetic construct
SITDSCAVY

SEQ ID NO: 3567 - protein, 9 aa, synthetic construct
SITSVFITK

SEQ ID NO: 3568 - protein, 10 aa, synthetic construct
SIVDREVTPF

SEQ ID NO: 3569 - protein, 10 aa, synthetic construct
SKGKIYPVGY

SEQ ID NO: 3570 - protein, 9 aa, synthetic construct
SLADFQIEK

SEQ ID NO: 3571 - protein, 9 aa, synthetic construct
SLAEILLKK

SEQ ID NO: 3572 - protein, 9 aa, synthetic construct
SLDKFLASV

SEQ ID NO: 3573 - protein, 10 aa, synthetic construct
SLELEHIEVK

SEQ ID NO: 3574 - protein, 9 aa, synthetic construct
SLEPLIDPL

SEQ ID NO: 3575 - protein, 10 aa, synthetic construct
SLEPVAVELK

SEQ ID NO: 3576 - protein, 9 aa, synthetic construct
SLFGSPVAK

SEQ ID NO: 3577 - protein, 9 aa, synthetic construct
SLFVSNHAY

SEQ ID NO: 3578 - protein, 9 aa, synthetic construct
SLHDAIMIV

SEQ ID NO: 3579 - protein, 9 aa, synthetic construct
SLIGGAASL

SEQ ID NO: 3580 - protein, 9 aa, synthetic construct
SLIGHLQTL

SEQ ID NO: 3581 - protein, 9 aa, synthetic construct
SLKETIGKY

SEQ ID NO: 3582 - protein, 9 aa, synthetic construct
SLLDCTFRL

SEQ ID NO: 3583 - protein, 9 aa, synthetic construct
SLLDIIEKV

SEQ ID NO: 3584 - protein, 9 aa, synthetic construct
SLLDPVPEV

SEQ ID NO: 3585 - protein, 10 aa, synthetic construct
SLLGGDVVSV

SEQ ID NO: 3586 - protein, 9 aa, synthetic construct
SLLPTSPRL

SEQ ID NO: 3587 - protein, 11 aa, synthetic construct
SLLQPLNVEID

SEQ ID NO: 3588 - protein, 11 aa, synthetic construct
SLLQPLNVKVD

SEQ ID NO: 3589 - protein, 9 aa, synthetic construct
SLLQTLYKV

SEQ ID NO: 3590 - protein, 11 aa, synthetic construct
SLMEESGICKV

SEQ ID NO: 3591 - protein, 9 aa, synthetic construct
SLMSHAIEL

SEQ ID NO: 3592 - protein, 9 aa, synthetic construct
SLMSVLIPK

SEQ ID NO: 3593 - protein, 9 aa, synthetic construct
SLPDFGISY

SEQ ID NO: 3594 - protein, 10 aa, synthetic construct
SLPDFGISYV

SEQ ID NO: 3595 - protein, 9 aa, synthetic construct
SLPDTTATL

SEQ ID NO: 3596 - protein, 9 aa, synthetic construct
SLPLFIVTL

SEQ ID NO: 3597 - protein, 9 aa, synthetic construct
SLPNKVTEL

SEQ ID NO: 3598 - protein, 9 aa, synthetic construct
SLPRFQVTL

SEQ ID NO: 3599 - protein, 9 aa, synthetic construct
SLPSFPSTL

SEQ ID NO: 3600 - protein, 9 aa, synthetic construct
SLPSGLLEL

SEQ ID NO: 3601 - protein, 8 aa, synthetic construct
SLPVPSYK

SEQ ID NO: 3602 - protein, 10 aa, synthetic construct
SLPYEPYKAL

SEQ ID NO: 3603 - protein, 9 aa, synthetic construct
SLQDEIQRV

SEQ ID NO: 3604 - protein, 9 aa, synthetic construct
SLQELFLAH

SEQ ID NO: 3605 - protein, 11 aa, synthetic construct
SLQELFLAHIL

SEQ ID NO: 3606 - protein, 8 aa, synthetic construct
SLQVHPDR

SEQ ID NO: 3607 - protein, 9 aa, synthetic construct
SLSEKTVLL

SEQ ID NO: 3608 - protein, 9 aa, synthetic construct
SLTSAYQHK

SEQ ID NO: 3609 - protein, 11 aa, synthetic construct
SLVGLGGTKSI

SEQ ID NO: 3610 - protein, 11 aa, synthetic construct
SLVNLGGSKSI

SEQ ID NO: 3611 - protein, 9 aa, synthetic construct
SLYGGTITI

SEQ ID NO: 3612 - protein, 10 aa, synthetic construct
SLYTDCPFPK

SEQ ID NO: 3613 - protein, 9 aa, synthetic construct
SMFDLTSEY

SEQ ID NO: 3614 - protein, 8 aa, synthetic construct
SMFEPPQV

SEQ ID NO: 3615 - protein, 9 aa, synthetic construct
SMFGAGLTV

SEQ ID NO: 3616 - protein, 9 aa, synthetic construct
SMLPTVLII

SEQ ID NO: 3617 - protein, 8 aa, synthetic construct
SMPTVTQI

SEQ ID NO: 3618 - protein, 9 aa, synthetic construct
SMYFSAVMV

SEQ ID NO: 3619 - protein, 9 aa, synthetic construct
SNCGVVNIY

SEQ ID NO: 3620 - protein, 9 aa, synthetic construct
SNHISSLFR

SEQ ID NO: 3621 - protein, 10 aa, synthetic construct
SNIDGTHIAK

SEQ ID NO: 3622 - protein, 10 aa, synthetic construct
SNLALVKPEK

SEQ ID NO: 3623 - protein, 9 aa, synthetic construct
SNLIVLHLR

SEQ ID NO: 3624 - protein, 9 aa, synthetic construct
SNQMLVPVI

SEQ ID NO: 3625 - protein, 11 aa, synthetic construct
SNTQAERSIIG

SEQ ID NO: 3626 - protein, 9 aa, synthetic construct
SPAKIHVFY

SEQ ID NO: 3627 - protein, 9 aa, synthetic construct
SPALKRLDL

SEQ ID NO: 3628 - protein, 9 aa, synthetic construct
SPAPTITSL

SEQ ID NO: 3629 - protein, 9 aa, synthetic construct
SPAVAAPAY

SEQ ID NO: 3630 - protein, 10 aa, synthetic construct
SPCALVASQY

SEQ ID NO: 3631 - protein, 9 aa, synthetic construct
SPDATIRIW

SEQ ID NO: 3632 - protein, 9 aa, synthetic construct
SPDPGILAY

SEQ ID NO: 3633 - protein, 9 aa, synthetic construct
SPDPLPVRY

SEQ ID NO: 3634 - protein, 9 aa, synthetic construct
SPDPSIYAY

SEQ ID NO: 3635 - protein, 9 aa, synthetic construct
SPEELYRVF

SEQ ID NO: 3636 - protein, 9 aa, synthetic construct
SPEPGAVVL

SEQ ID NO: 3637 - protein, 9 aa, synthetic construct
SPFEGGTFK

SEQ ID NO: 3638 - protein, 9 aa, synthetic construct
SPFFSEDTF

SEQ ID NO: 3639 - protein, 9 aa, synthetic construct
SPFHDIPIY

SEQ ID NO: 3640 - protein, 9 aa, synthetic construct
SPFLTITSM

SEQ ID NO: 3641 - protein, 9 aa, synthetic construct
SPFPELEQF

SEQ ID NO: 3642 - protein, 10 aa, synthetic construct
SPFPGPDPGF

SEQ ID NO: 3643 - protein, 9 aa, synthetic construct
SPFPSSIPH

SEQ ID NO: 3644 - protein, 11 aa, synthetic construct
SPFPSSIPHAF

SEQ ID NO: 3645 - protein, 9 aa, synthetic construct
SPFQPHVPY

SEQ ID NO: 3646 - protein, 11 aa, synthetic construct
SPFYGDKMNLY

SEQ ID NO: 3647 - protein, 10 aa, synthetic construct
SPFYPGKTTY

SEQ ID NO: 3648 - protein, 9 aa, synthetic construct
SPIDVVEKY

SEQ ID NO: 3649 - protein, 10 aa, synthetic construct
SPIEFLENAY

SEQ ID NO: 3650 - protein, 9 aa, synthetic construct
SPILPITEF

SEQ ID NO: 3651 - protein, 10 aa, synthetic construct
SPIMEELITF

SEQ ID NO: 3652 - protein, 9 aa, synthetic construct
SPIPESCSF

SEQ ID NO: 3653 - protein, 10 aa, synthetic construct
SPIPFPPLSY

SEQ ID NO: 3654 - protein, 9 aa, synthetic construct
SPIQFESAW

SEQ ID NO: 3655 - protein, 10 aa, synthetic construct
SPIQSDLDAF

SEQ ID NO: 3656 - protein, 11 aa, synthetic construct
SPIRPPKYYTY

SEQ ID NO: 3657 - protein, 9 aa, synthetic construct
SPKLPVSSL

SEQ ID NO: 3658 - protein, 9 aa, synthetic construct
SPLAARLLY

SEQ ID NO: 3659 - protein, 9 aa, synthetic construct
SPLDLRASF

SEQ ID NO: 3660 - protein, 9 aa, synthetic construct
SPLEDSWCL

SEQ ID NO: 3661 - protein, 9 aa, synthetic construct
SPLHLAAQY

SEQ ID NO: 3662 - protein, 11 aa, synthetic construct
SPLNLDIGQVY

SEQ ID NO: 3663 - protein, 9 aa, synthetic construct
SPLPEPTTY

SEQ ID NO: 3664 - protein, 10 aa, synthetic construct
SPLPGDGITF

SEQ ID NO: 3665 - protein, 10 aa, synthetic construct
SPLTGGNVAF

SEQ ID NO: 3666 - protein, 9 aa, synthetic construct
SPLTKSISL

SEQ ID NO: 3667 - protein, 9 aa, synthetic construct
SPMDTFLLI

SEQ ID NO: 3668 - protein, 9 aa, synthetic construct
SPNAKEFVY

SEQ ID NO: 3669 - protein, 10 aa, synthetic construct
SPPIIVGEEY

SEQ ID NO: 3670 - protein, 10 aa, synthetic construct
SPQPDGKVVY

SEQ ID NO: 3671 - protein, 9 aa, synthetic construct
SPRLPVGGF

SEQ ID NO: 3672 - protein, 9 aa, synthetic construct
SPRYIFTML

SEQ ID NO: 3673 - protein, 9 aa, synthetic construct
SPSDLDLVM

SEQ ID NO: 3674 - protein, 9 aa, synthetic construct
SPSDVFIGY

SEQ ID NO: 3675 - protein, 9 aa, synthetic construct
SPSEWQMAY

SEQ ID NO: 3676 - protein, 9 aa, synthetic construct
SPSNIILDF

SEQ ID NO: 3677 - protein, 9 aa, synthetic construct
SPSPAVQTF

SEQ ID NO: 3678 - protein, 9 aa, synthetic construct
SPSVVLASY

SEQ ID NO: 3679 - protein, 9 aa, synthetic construct
SPTEHPSVF

SEQ ID NO: 3680 - protein, 9 aa, synthetic construct
SPTSVLPSF

SEQ ID NO: 3681 - protein, 9 aa, synthetic construct
SPVDSVLFY

SEQ ID NO: 3682 - protein, 9 aa, synthetic construct
SPVESVLFY

SEQ ID NO: 3683 - protein, 9 aa, synthetic construct
SPVFVIVGF

SEQ ID NO: 3684 - protein, 10 aa, synthetic construct
SPVIHPPVSY

SEQ ID NO: 3685 - protein, 9 aa, synthetic construct
SPVLHFYVR

SEQ ID NO: 3686 - protein, 10 aa, synthetic construct
SPVSKGILQY

SEQ ID NO: 3687 - protein, 9 aa, synthetic construct
SPVTLKEAY

SEQ ID NO: 3688 - protein, 9 aa, synthetic construct
SPVVAFYVW

SEQ ID NO: 3689 - protein, 10 aa, synthetic construct
SPVVGQLIDL

SEQ ID NO: 3690 - protein, 8 aa, synthetic construct
SPVVRVAV

SEQ ID NO: 3691 - protein, 9 aa, synthetic construct
SPVYIAIFY

SEQ ID NO: 3692 - protein, 9 aa, synthetic construct
SPWADNTAL

SEQ ID NO: 3693 - protein, 9 aa, synthetic construct
SPYNEVLSF

SEQ ID NO: 3694 - protein, 9 aa, synthetic construct
SPYWVSPAY

SEQ ID NO: 3695 - protein, 8 aa, synthetic construct
SQALILKI

SEQ ID NO: 3696 - protein, 9 aa, synthetic construct
SQANVVVKI

SEQ ID NO: 3697 - protein, 9 aa, synthetic construct
SQCPHIVRI

SEQ ID NO: 3698 - protein, 8 aa, synthetic construct
SQFFITTV

SEQ ID NO: 3699 - protein, 9 aa, synthetic construct
SQFMYDEHI

SEQ ID NO: 3700 - protein, 9 aa, synthetic construct
SQFSGKITV

SEQ ID NO: 3701 - protein, 9 aa, synthetic construct
SQFSVPSSY

SEQ ID NO: 3702 - protein, 8 aa, synthetic construct
SQFVMEGV

SEQ ID NO: 3703 - protein, 9 aa, synthetic construct
SQIAFRLQV

SEQ ID NO: 3704 - protein, 8 aa, synthetic construct
SQIPLSKI

SEQ ID NO: 3705 - protein, 8 aa, synthetic construct
SQIYLHHI

SEQ ID NO: 3706 - protein, 8 aa, synthetic construct
SQLILHLI

SEQ ID NO: 3707 - protein, 8 aa, synthetic construct
SQLQLRCV

SEQ ID NO: 3708 - protein, 8 aa, synthetic construct
SQLVVETI

SEQ ID NO: 3709 - protein, 8 aa, synthetic construct
SQMESMLI

SEQ ID NO: 3710 - protein, 9 aa, synthetic construct
SQMVIIVTV

SEQ ID NO: 3711 - protein, 8 aa, synthetic construct
SQRFTVQI

SEQ ID NO: 3712 - protein, 8 aa, synthetic construct
SQYLMHEV

SEQ ID NO: 3713 - protein, 9 aa, synthetic construct
SQYLTRITI

SEQ ID NO: 3714 - protein, 8 aa, synthetic construct
SQYQLNSI

SEQ ID NO: 3715 - protein, 10 aa, synthetic construct
SRAGLQFPVG

SEQ ID NO: 3716 - protein, 11 aa, synthetic construct
SRAGLQFPVGR

SEQ ID NO: 3717 - protein, 9 aa, synthetic construct
SRAHLVAVF

SEQ ID NO: 3718 - protein, 9 aa, synthetic construct
SRAPVFLQF

SEQ ID NO: 3719 - protein, 10 aa, synthetic construct
SRCPSCFYNL

SEQ ID NO: 3720 - protein, 11 aa, synthetic construct
SRCPSCFYNLL

SEQ ID NO: 3721 - protein, 9 aa, synthetic construct
SRDDNMFQI

SEQ ID NO: 3722 - protein, 9 aa, synthetic construct
SRFARLQKL

SEQ ID NO: 3723 - protein, 9 aa, synthetic construct
SRFEKEFSF

SEQ ID NO: 3724 - protein, 9 aa, synthetic construct
SRFLIINAM

SEQ ID NO: 3725 - protein, 11 aa, synthetic construct
SRFLPRPVFSK

SEQ ID NO: 3726 - protein, 9 aa, synthetic construct
SRFPEALRL

SEQ ID NO: 3727 - protein, 9 aa, synthetic construct
SRFPHLLAH

SEQ ID NO: 3728 - protein, 9 aa, synthetic construct
SRFSHLTSL

SEQ ID NO: 3729 - protein, 9 aa, synthetic construct
SRIFFPVVF

SEQ ID NO: 3730 - protein, 9 aa, synthetic construct
SRIGLLTRI

SEQ ID NO: 3731 - protein, 10 aa, synthetic construct
SRISLPLPNF

SEQ ID NO: 3732 - protein, 9 aa, synthetic construct
SRKEIQILL

SEQ ID NO: 3733 - protein, 9 aa, synthetic construct
SRLAIRNEF

SEQ ID NO: 3734 - protein, 9 aa, synthetic construct
SRLDFTVEH

SEQ ID NO: 3735 - protein, 9 aa, synthetic construct
SRLGSVFPF

SEQ ID NO: 3736 - protein, 9 aa, synthetic construct
SRLIFPASY

SEQ ID NO: 3737 - protein, 11 aa, synthetic construct
SRLPASAPLFM

SEQ ID NO: 3738 - protein, 9 aa, synthetic construct
SRLQIDPVM

SEQ ID NO: 3739 - protein, 10 aa, synthetic construct
SRLSIPTYGL

SEQ ID NO: 3740 - protein, 10 aa, synthetic construct
SRLTTPVFGK

SEQ ID NO: 3741 - protein, 9 aa, synthetic construct
SRNAYMLVY

SEQ ID NO: 3742 - protein, 11 aa, synthetic construct
SRNSNTVVFVK

SEQ ID NO: 3743 - protein, 9 aa, synthetic construct
SRPDLPLLV

SEQ ID NO: 3744 - protein, 9 aa, synthetic construct
SRSLLQTTF

SEQ ID NO: 3745 - protein, 9 aa, synthetic construct
SRSLVLNRL

SEQ ID NO: 3746 - protein, 10 aa, synthetic construct
SRTQIVHVKF

SEQ ID NO: 3747 - protein, 10 aa, synthetic construct
SRTQVTYLAF

SEQ ID NO: 3748 - protein, 9 aa, synthetic construct
SRVKFSPSL

SEQ ID NO: 3749 - protein, 9 aa, synthetic construct
SRVKLILEY

SEQ ID NO: 3750 - protein, 10 aa, synthetic construct
SRVNIPKVLR

SEQ ID NO: 3751 - protein, 9 aa, synthetic construct
SRVQVQKAF

SEQ ID NO: 3752 - protein, 9 aa, synthetic construct
SRWPAFPAF

SEQ ID NO: 3753 - protein, 9 aa, synthetic construct
SRYQGVNLY

SEQ ID NO: 3754 - protein, 8 aa, synthetic construct
SSAAAVSK

SEQ ID NO: 3755 - protein, 8 aa, synthetic construct
SSAHVYLR

SEQ ID NO: 3756 - protein, 8 aa, synthetic construct
SSAMSAAK

SEQ ID NO: 3757 - protein, 9 aa, synthetic construct
SSCQTIIPK

SEQ ID NO: 3758 - protein, 9 aa, synthetic construct
SSEITSLYY

SEQ ID NO: 3759 - protein, 9 aa, synthetic construct
SSEQTFMYY

SEQ ID NO: 3760 - protein, 9 aa, synthetic construct
SSFPTVVIY

SEQ ID NO: 3761 - protein, 9 aa, synthetic construct
SSFSGLLRK

SEQ ID NO: 3762 - protein, 8 aa, synthetic construct
SSFVFSTV

SEQ ID NO: 3763 - protein, 9 aa, synthetic construct
SSGDIFLEK

SEQ ID NO: 3764 - protein, 8 aa, synthetic construct
SSGPERIL

SEQ ID NO: 3765 - protein, 8 aa, synthetic construct
SSICLPAI

SEQ ID NO: 3766 - protein, 9 aa, synthetic construct
SSLLEKGLD

SEQ ID NO: 3767 - protein, 9 aa, synthetic construct
SSLPTQLFK

SEQ ID NO: 3768 - protein, 11 aa, synthetic construct
SSLPTVGVFAK

SEQ ID NO: 3769 - protein, 9 aa, synthetic construct
SSLSRFLMV

SEQ ID NO: 3770 - protein, 9 aa, synthetic construct
SSPFFREAL

SEQ ID NO: 3771 - protein, 8 aa, synthetic construct
SSPLEAHK

SEQ ID NO: 3772 - protein, 8 aa, synthetic construct
SSPSVLEI

SEQ ID NO: 3773 - protein, 8 aa, synthetic construct
SSPTEPVK

SEQ ID NO: 3774 - protein, 9 aa, synthetic construct
SSPVADIAV

SEQ ID NO: 3775 - protein, 10 aa, synthetic construct
SSRSQVPIIL

SEQ ID NO: 3776 - protein, 8 aa, synthetic construct
SSYIVSQI

SEQ ID NO: 3777 - protein, 9 aa, synthetic construct
SSYPMASLY

SEQ ID NO: 3778 - protein, 9 aa, synthetic construct
STCEFVRTL

SEQ ID NO: 3779 - protein, 9 aa, synthetic construct
STDHIPILY

SEQ ID NO: 3780 - protein, 10 aa, synthetic construct
STDKFKTDFY

SEQ ID NO: 3781 - protein, 9 aa, synthetic construct
STDWHVVNY

SEQ ID NO: 3782 - protein, 9 aa, synthetic construct
STFDTQITK

SEQ ID NO: 3783 - protein, 9 aa, synthetic construct
STFFYPKLK

SEQ ID NO: 3784 - protein, 9 aa, synthetic construct
STIEYVIQR

SEQ ID NO: 3785 - protein, 9 aa, synthetic construct
STNNWVLIK

SEQ ID NO: 3786 - protein, 8 aa, synthetic construct
STPEGIAL

SEQ ID NO: 3787 - protein, 8 aa, synthetic construct
STPFGQAL

SEQ ID NO: 3788 - protein, 10 aa, synthetic construct
STPLAGLAPK

SEQ ID NO: 3789 - protein, 9 aa, synthetic construct
STPSGCLEL

SEQ ID NO: 3790 - protein, 9 aa, synthetic construct
STVFRIPEF

SEQ ID NO: 3791 - protein, 10 aa, synthetic construct
STYDLYTIPK

SEQ ID NO: 3792 - protein, 9 aa, synthetic construct
SVADIIANY

SEQ ID NO: 3793 - protein, 10 aa, synthetic construct
SVADWKVMAF

SEQ ID NO: 3794 - protein, 10 aa, synthetic construct
SVAEVTTCEY

SEQ ID NO: 3795 - protein, 11 aa, synthetic construct
SVASAAAVLSH

SEQ ID NO: 3796 - protein, 9 aa, synthetic construct
SVCQGYSAL

SEQ ID NO: 3797 - protein, 9 aa, synthetic construct
SVCVLDLRK

SEQ ID NO: 3798 - protein, 8 aa, synthetic construct
SVDIPLDK

SEQ ID NO: 3799 - protein, 10 aa, synthetic construct
SVFDADTLLY

SEQ ID NO: 3800 - protein, 10 aa, synthetic construct
SVFEDPVISK

SEQ ID NO: 3801 - protein, 9 aa, synthetic construct
SVFELTFKR

SEQ ID NO: 3802 - protein, 9 aa, synthetic construct
SVFGTMPLK

SEQ ID NO: 3803 - protein, 8 aa, synthetic construct
SVGVVIGR

SEQ ID NO: 3804 - protein, 9 aa, synthetic construct
SVIDGVTVL

SEQ ID NO: 3805 - protein, 9 aa, synthetic construct
SVIDIINKY

SEQ ID NO: 3806 - protein, 9 aa, synthetic construct
SVIEAVAHF

SEQ ID NO: 3807 - protein, 9 aa, synthetic construct
SVIEQILHY

SEQ ID NO: 3808 - protein, 9 aa, synthetic construct
SVIGASSQF

SEQ ID NO: 3809 - protein, 10 aa, synthetic construct
SVISRFLEEY

SEQ ID NO: 3810 - protein, 9 aa, synthetic construct
SVIVQPFSK

SEQ ID NO: 3811 - protein, 9 aa, synthetic construct
SVLDLSVHK

SEQ ID NO: 3812 - protein, 9 aa, synthetic construct
SVLDSFLKY

SEQ ID NO: 3813 - protein, 9 aa, synthetic construct
SVLPFQIYY

SEQ ID NO: 3814 - protein, 9 aa, synthetic construct
SVLPWIILH

SEQ ID NO: 3815 - protein, 9 aa, synthetic construct
SVLWPWINR

SEQ ID NO: 3816 - protein, 10 aa, synthetic construct
SVMSTVEWNK

SEQ ID NO: 3817 - protein, 9 aa, synthetic construct
SVNGFISTL

SEQ ID NO: 3818 - protein, 9 aa, synthetic construct
SVNNVVVRY

SEQ ID NO: 3819 - protein, 9 aa, synthetic construct
SVPENVLSF

SEQ ID NO: 3820 - protein, 11 aa, synthetic construct
SVPSSETVICR

SEQ ID NO: 3821 - protein, 9 aa, synthetic construct
SVPVPATEL

SEQ ID NO: 3822 - protein, 9 aa, synthetic construct
SVPVSLQTL

SEQ ID NO: 3823 - protein, 9 aa, synthetic construct
SVPYPTASL

SEQ ID NO: 3824 - protein, 9 aa, synthetic construct
SVQEYFVRK

SEQ ID NO: 3825 - protein, 9 aa, synthetic construct
SVQGFFLNH

SEQ ID NO: 3826 - protein, 8 aa, synthetic construct
SVSFYHVK

SEQ ID NO: 3827 - protein, 9 aa, synthetic construct
SVTAITVLY

SEQ ID NO: 3828 - protein, 9 aa, synthetic construct
SVTEIQEKW

SEQ ID NO: 3829 - protein, 9 aa, synthetic construct
SVVDISQQY

SEQ ID NO: 3830 - protein, 9 aa, synthetic construct
SVVDLINHY

SEQ ID NO: 3831 - protein, 9 aa, synthetic construct
SVVGAISSY

SEQ ID NO: 3832 - protein, 10 aa, synthetic construct
SVVGGFVSHY

SEQ ID NO: 3833 - protein, 11 aa, synthetic construct
SVYYNEATGGK

SEQ ID NO: 3834 - protein, 10 aa, synthetic construct
SWDDSSDSYW

SEQ ID NO: 3835 - protein, 9 aa, synthetic construct
SWEDAAILL

SEQ ID NO: 3836 - protein, 9 aa, synthetic construct
SYADQMFLL

SEQ ID NO: 3837 - protein, 9 aa, synthetic construct
SYDLANRDF

SEQ ID NO: 3838 - protein, 9 aa, synthetic construct
SYDSKLVWF

SEQ ID NO: 3839 - protein, 9 aa, synthetic construct
SYDTFVVRV

SEQ ID NO: 3840 - protein, 9 aa, synthetic construct
SYFGSFSSL

SEQ ID NO: 3841 - protein, 10 aa, synthetic construct
SYGGGSGGGF

SEQ ID NO: 3842 - protein, 9 aa, synthetic construct
SYIEHIFEI

SEQ ID NO: 3843 - protein, 9 aa, synthetic construct
SYLDKVQAL

SEQ ID NO: 3844 - protein, 10 aa, synthetic construct
SYLDQVKLQF

SEQ ID NO: 3845 - protein, 9 aa, synthetic construct
SYLDVKQRL

SEQ ID NO: 3846 - protein, 9 aa, synthetic construct
SYLEVLLKL

SEQ ID NO: 3847 - protein, 10 aa, synthetic construct
SYLPVGSVSF

SEQ ID NO: 3848 - protein, 9 aa, synthetic construct
SYLSRLQYF

SEQ ID NO: 3849 - protein, 9 aa, synthetic construct
SYMGHFDLL

SEQ ID NO: 3850 - protein, 9 aa, synthetic construct
SYQKVIELF

SEQ ID NO: 3851 - protein, 9 aa, synthetic construct
SYVETELIF

SEQ ID NO: 3852 - protein, 9 aa, synthetic construct
TAAAATLSL

SEQ ID NO: 3853 - protein, 10 aa, synthetic construct
TAAAVVGLLY

SEQ ID NO: 3854 - protein, 10 aa, synthetic construct
TAADAVLCAY

SEQ ID NO: 3855 - protein, 9 aa, synthetic construct
TAADIFKQY

SEQ ID NO: 3856 - protein, 9 aa, synthetic construct
TAADTVIFY

SEQ ID NO: 3857 - protein, 9 aa, synthetic construct
TAADTVIIY

SEQ ID NO: 3858 - protein, 9 aa, synthetic construct
TAAIGYLAY

SEQ ID NO: 3859 - protein, 9 aa, synthetic construct
TAAPTIGVL

SEQ ID NO: 3860 - protein, 9 aa, synthetic construct
TAAPVPTTL

SEQ ID NO: 3861 - protein, 9 aa, synthetic construct
TAAPVVPEL

SEQ ID NO: 3862 - protein, 9 aa, synthetic construct
TAASLLDVF

SEQ ID NO: 3863 - protein, 9 aa, synthetic construct
TAASPTIAL

SEQ ID NO: 3864 - protein, 9 aa, synthetic construct
TAAVEFLLY

SEQ ID NO: 3865 - protein, 9 aa, synthetic construct
TAAVFKETF

SEQ ID NO: 3866 - protein, 9 aa, synthetic construct
TADAFIVRF

SEQ ID NO: 3867 - protein, 9 aa, synthetic construct
TADHNLLLY

SEQ ID NO: 3868 - protein, 9 aa, synthetic construct
TAEEAVAVY

SEQ ID NO: 3869 - protein, 11 aa, synthetic construct
TAEGEINNVQW

SEQ ID NO: 3870 - protein, 11 aa, synthetic construct
TAEGQATLERL

SEQ ID NO: 3871 - protein, 9 aa, synthetic construct
TAEGTVFHF

SEQ ID NO: 3872 - protein, 9 aa, synthetic construct
TAEISCFTY

SEQ ID NO: 3873 - protein, 9 aa, synthetic construct
TAFLHPEEF

SEQ ID NO: 3874 - protein, 9 aa, synthetic construct
TAFLHPEEY

SEQ ID NO: 3875 - protein, 10 aa, synthetic construct
TAFNGELEDY

SEQ ID NO: 3876 - protein, 9 aa, synthetic construct
TAFPEASFL

SEQ ID NO: 3877 - protein, 9 aa, synthetic construct
TAFPGTGGF

SEQ ID NO: 3878 - protein, 9 aa, synthetic construct
TAFRYLAQY

SEQ ID NO: 3879 - protein, 9 aa, synthetic construct
TAGAVTQCY

SEQ ID NO: 3880 - protein, 9 aa, synthetic construct
TAGDFQEIY

SEQ ID NO: 3881 - protein, 9 aa, synthetic construct
TAHEPPLLY

SEQ ID NO: 3882 - protein, 9 aa, synthetic construct
TAIDDMEAY

SEQ ID NO: 3883 - protein, 9 aa, synthetic construct
TAIEAQHLL

SEQ ID NO: 3884 - protein, 9 aa, synthetic construct
TAIESTPTL

SEQ ID NO: 3885 - protein, 9 aa, synthetic construct
TAIGELPPY

SEQ ID NO: 3886 - protein, 9 aa, synthetic construct
TAIKPLPSY

SEQ ID NO: 3887 - protein, 9 aa, synthetic construct
TAIPVTQEL

SEQ ID NO: 3888 - protein, 9 aa, synthetic construct
TAIREAQTF

SEQ ID NO: 3889 - protein, 9 aa, synthetic construct
TAISCSRVF

SEQ ID NO: 3890 - protein, 9 aa, synthetic construct
TAISLFYEL

SEQ ID NO: 3891 - protein, 9 aa, synthetic construct
TAIVDKIGF

SEQ ID NO: 3892 - protein, 9 aa, synthetic construct
TAIYEDFSF

SEQ ID NO: 3893 - protein, 9 aa, synthetic construct
TAKISDFSW

SEQ ID NO: 3894 - protein, 9 aa, synthetic construct
TALFVAATY

SEQ ID NO: 3895 - protein, 9 aa, synthetic construct
TALNLFFKL

SEQ ID NO: 3896 - protein, 9 aa, synthetic construct
TALQAIVEY

SEQ ID NO: 3897 - protein, 9 aa, synthetic construct
TALRLALQY

SEQ ID NO: 3898 - protein, 9 aa, synthetic construct
TALSHPLLY

SEQ ID NO: 3899 - protein, 9 aa, synthetic construct
TAMDVVYAL

SEQ ID NO: 3900 - protein, 10 aa, synthetic construct
TAMDVVYALK

SEQ ID NO: 3901 - protein, 11 aa, synthetic construct
TAMDVVYALKR

SEQ ID NO: 3902 - protein, 9 aa, synthetic construct
TAMPYLTSY

SEQ ID NO: 3903 - protein, 9 aa, synthetic construct
TANCLTVTF

SEQ ID NO: 3904 - protein, 9 aa, synthetic construct
TAPIPGATL

SEQ ID NO: 3905 - protein, 8 aa, synthetic construct
TAPLAPTI

SEQ ID NO: 3906 - protein, 8 aa, synthetic construct
TAPLVVVV

SEQ ID NO: 3907 - protein, 9 aa, synthetic construct
TAREFEIDF

SEQ ID NO: 3908 - protein, 9 aa, synthetic construct
TARMEDFTF

SEQ ID NO: 3909 - protein, 9 aa, synthetic construct
TASELKILY

SEQ ID NO: 3910 - protein, 9 aa, synthetic construct
TASEMILVL

SEQ ID NO: 3911 - protein, 9 aa, synthetic construct
TASPVAVSL

SEQ ID NO: 3912 - protein, 9 aa, synthetic construct
TATDIRVTL

SEQ ID NO: 3913 - protein, 9 aa, synthetic construct
TATEITESF

SEQ ID NO: 3914 - protein, 9 aa, synthetic construct
TATELIMFY

SEQ ID NO: 3915 - protein, 9 aa, synthetic construct
TATPVTPEM

SEQ ID NO: 3916 - protein, 9 aa, synthetic construct
TATVIANSF

SEQ ID NO: 3917 - protein, 9 aa, synthetic construct
TAVALLRLL

SEQ ID NO: 3918 - protein, 8 aa, synthetic construct
TAVATFLY

SEQ ID NO: 3919 - protein, 9 aa, synthetic construct
TAVCILEGF

SEQ ID NO: 3920 - protein, 9 aa, synthetic construct
TAVDSLVAY

SEQ ID NO: 3921 - protein, 9 aa, synthetic construct
TAVELLDVF

SEQ ID NO: 3922 - protein, 9 aa, synthetic construct
TAVGSILLY

SEQ ID NO: 3923 - protein, 10 aa, synthetic construct
TAVINVFKGG

SEQ ID NO: 3924 - protein, 11 aa, synthetic construct
TAVKEDEINVY

SEQ ID NO: 3925 - protein, 9 aa, synthetic construct
TAVLATIAF

SEQ ID NO: 3926 - protein, 10 aa, synthetic construct
TAVLVDGMLY

SEQ ID NO: 3927 - protein, 9 aa, synthetic construct
TAVTTVPSM

SEQ ID NO: 3928 - protein, 9 aa, synthetic construct
TAVVEIDTF

SEQ ID NO: 3929 - protein, 8 aa, synthetic construct
TAVVPLVY

SEQ ID NO: 3930 - protein, 10 aa, synthetic construct
TAWDEADVRF

SEQ ID NO: 3931 - protein, 11 aa, synthetic construct
TAWLDGKHVVF

SEQ ID NO: 3932 - protein, 10 aa, synthetic construct
TAWLEIMTKY

SEQ ID NO: 3933 - protein, 9 aa, synthetic construct
TAWLLYDTY

SEQ ID NO: 3934 - protein, 9 aa, synthetic construct
TAYLDGVSL

SEQ ID NO: 3935 - protein, 9 aa, synthetic construct
TAYNLVHEL

SEQ ID NO: 3936 - protein, 9 aa, synthetic construct
TAYVGSAVM

SEQ ID NO: 3937 - protein, 9 aa, synthetic construct
TAYYNDPAF

SEQ ID NO: 3938 - protein, 9 aa, synthetic construct
TCIDQVQTF

SEQ ID NO: 3939 - protein, 9 aa, synthetic construct
TCPLTGATL

SEQ ID NO: 3940 - protein, 9 aa, synthetic construct
TDAAVSFAK

SEQ ID NO: 3941 - protein, 9 aa, synthetic construct
TDLIAILLF

SEQ ID NO: 3942 - protein, 9 aa, synthetic construct
TDSAGHILY

SEQ ID NO: 3943 - protein, 11 aa, synthetic construct
TDSAGHILYSK

SEQ ID NO: 3944 - protein, 10 aa, synthetic construct
TDTDETELAR

SEQ ID NO: 3945 - protein, 9 aa, synthetic construct
TEADIFHQA

SEQ ID NO: 3946 - protein, 11 aa, synthetic construct
TECQNTEYQQL

SEQ ID NO: 3947 - protein, 9 aa, synthetic construct
TEDFIVESL

SEQ ID NO: 3948 - protein, 9 aa, synthetic construct
TEEGQKIVL

SEQ ID NO: 3949 - protein, 8 aa, synthetic construct
TEFESFSF

SEQ ID NO: 3950 - protein, 8 aa, synthetic construct
TEFLFHTA

SEQ ID NO: 3951 - protein, 8 aa, synthetic construct
TEGFEAAK

SEQ ID NO: 3952 - protein, 8 aa, synthetic construct
TEGSFVYK

SEQ ID NO: 3953 - protein, 9 aa, synthetic construct
TEHAEFLHC

SEQ ID NO: 3954 - protein, 9 aa, synthetic construct
TEIEKSISA

SEQ ID NO: 3955 - protein, 8 aa, synthetic construct
TEIQTVNK

SEQ ID NO: 3956 - protein, 11 aa, synthetic construct
TEISSAEKVAL

SEQ ID NO: 3957 - protein, 9 aa, synthetic construct
TELELFKAA

SEQ ID NO: 3958 - protein, 9 aa, synthetic construct
TELRFEVEA

SEQ ID NO: 3959 - protein, 9 aa, synthetic construct
TEMERFAPP

SEQ ID NO: 3960 - protein, 9 aa, synthetic construct
TESGLNVTL

SEQ ID NO: 3961 - protein, 9 aa, synthetic construct
TESPCALVA

SEQ ID NO: 3962 - protein, 9 aa, synthetic construct
TESSQSFVA

SEQ ID NO: 3963 - protein, 9 aa, synthetic construct
TESTPITAV

SEQ ID NO: 3964 - protein, 9 aa, synthetic construct
TEVANIPVA

SEQ ID NO: 3965 - protein, 9 aa, synthetic construct
TEVAPPPPP

SEQ ID NO: 3966 - protein, 10 aa, synthetic construct
TEVDMKEVEL

SEQ ID NO: 3967 - protein, 9 aa, synthetic construct
TEVELDNQI

SEQ ID NO: 3968 - protein, 10 aa, synthetic construct
TEVLKTHGLL

SEQ ID NO: 3969 - protein, 11 aa, synthetic construct
TEVLKTHGLLV

SEQ ID NO: 3970 - protein, 10 aa, synthetic construct
TEYENFKVQV

SEQ ID NO: 3971 - protein, 9 aa, synthetic construct
TEYFTQTLA

SEQ ID NO: 3972 - protein, 9 aa, synthetic construct
TEYSFLKEV

SEQ ID NO: 3973 - protein, 9 aa, synthetic construct
TFADSYITV

SEQ ID NO: 3974 - protein, 9 aa, synthetic construct
TFDDIVHSF

SEQ ID NO: 3975 - protein, 9 aa, synthetic construct
TFDDVAVTF

SEQ ID NO: 3976 - protein, 8 aa, synthetic construct
TFDEIVNI

SEQ ID NO: 3977 - protein, 9 aa, synthetic construct
TFDEVLELM

SEQ ID NO: 3978 - protein, 9 aa, synthetic construct
TFDFVHNVM

SEQ ID NO: 3979 - protein, 9 aa, synthetic construct
TFDLTVVSY

SEQ ID NO: 3980 - protein, 9 aa, synthetic construct
TFDNVTSYL

SEQ ID NO: 3981 - protein, 9 aa, synthetic construct
TFDPVTKVL

SEQ ID NO: 3982 - protein, 8 aa, synthetic construct
TFDSTIHF

SEQ ID NO: 3983 - protein, 9 aa, synthetic construct
TFDVAPSRL

SEQ ID NO: 3984 - protein, 11 aa, synthetic construct
TFDVAPSRLDF

SEQ ID NO: 3985 - protein, 11 aa, synthetic construct
TFIALDRLLQH

SEQ ID NO: 3986 - protein, 9 aa, synthetic construct
TFLAQHASL

SEQ ID NO: 3987 - protein, 11 aa, synthetic construct
TFPNIASATKF

SEQ ID NO: 3988 - protein, 9 aa, synthetic construct
TFQPYLDTL

SEQ ID NO: 3989 - protein, 8 aa, synthetic construct
TGFITTEV

SEQ ID NO: 3990 - protein, 8 aa, synthetic construct
TGHTLLER

SEQ ID NO: 3991 - protein, 11 aa, synthetic construct
TGPPVSELITK

SEQ ID NO: 3992 - protein, 11 aa, synthetic construct
TGTITTFEHAH

SEQ ID NO: 3993 - protein, 11 aa, synthetic construct
TGWDESQANHF

SEQ ID NO: 3994 - protein, 9 aa, synthetic construct
TGYGGYEEY

SEQ ID NO: 3995 - protein, 9 aa, synthetic construct
TGYYDQEIY

SEQ ID NO: 3996 - protein, 9 aa, synthetic construct
THAAALSVR

SEQ ID NO: 3997 - protein, 9 aa, synthetic construct
TIAGVASAL

SEQ ID NO: 3998 - protein, 9 aa, synthetic construct
TIASAIPAY

SEQ ID NO: 3999 - protein, 9 aa, synthetic construct
TIDEHDAII

SEQ ID NO: 4000 - protein, 9 aa, synthetic construct
TIFGKAHSL

SEQ ID NO: 4001 - protein, 11 aa, synthetic construct
TIHGDLYYEGK

SEQ ID NO: 4002 - protein, 11 aa, synthetic construct
TIIDSDKIMVL

SEQ ID NO: 4003 - protein, 9 aa, synthetic construct
TIIEFTREL

SEQ ID NO: 4004 - protein, 9 aa, synthetic construct
TIISSLPEF

SEQ ID NO: 4005 - protein, 9 aa, synthetic construct
TIKPTVDDD

SEQ ID NO: 4006 - protein, 8 aa, synthetic construct
TILGHVQR

SEQ ID NO: 4007 - protein, 8 aa, synthetic construct
TINIVHPK

SEQ ID NO: 4008 - protein, 10 aa, synthetic construct
TIPEIATSEL

SEQ ID NO: 4009 - protein, 9 aa, synthetic construct
TIPEYVPAF

SEQ ID NO: 4010 - protein, 9 aa, synthetic construct
TIPSLQNSL

SEQ ID NO: 4011 - protein, 9 aa, synthetic construct
TIRYPDPLI

SEQ ID NO: 4012 - protein, 10 aa, synthetic construct
TISSPLEAHK

SEQ ID NO: 4013 - protein, 9 aa, synthetic construct
TITTFEHAH

SEQ ID NO: 4014 - protein, 9 aa, synthetic construct
TIYQSASVF

SEQ ID NO: 4015 - protein, 9 aa, synthetic construct
TLAAVLQRI

SEQ ID NO: 4016 - protein, 9 aa, synthetic construct
TLADLVHHV

SEQ ID NO: 4017 - protein, 9 aa, synthetic construct
TLDDATDAW

SEQ ID NO: 4018 - protein, 9 aa, synthetic construct
TLDEKVAEL

SEQ ID NO: 4019 - protein, 9 aa, synthetic construct
TLEENEAGD

SEQ ID NO: 4020 - protein, 9 aa, synthetic construct
TLGDFAAEY

SEQ ID NO: 4021 - protein, 9 aa, synthetic construct
TLIEDILGV

SEQ ID NO: 4022 - protein, 9 aa, synthetic construct
TLKDRELSF

SEQ ID NO: 4023 - protein, 10 aa, synthetic construct
TLLEQLDDDQ

SEQ ID NO: 4024 - protein, 9 aa, synthetic construct
TLLPLRVFL

SEQ ID NO: 4025 - protein, 11 aa, synthetic construct
TLLSDASHLPK

SEQ ID NO: 4026 - protein, 10 aa, synthetic construct
TLPESLLSSL

SEQ ID NO: 4027 - protein, 10 aa, synthetic construct
TLPKISPSSL

SEQ ID NO: 4028 - protein, 10 aa, synthetic construct
TLQDVVSHSK

SEQ ID NO: 4029 - protein, 9 aa, synthetic construct
TLSGWILSK

SEQ ID NO: 4030 - protein, 9 aa, synthetic construct
TLTDCVVVV

SEQ ID NO: 4031 - protein, 10 aa, synthetic construct
TLTEEGVIKV

SEQ ID NO: 4032 - protein, 9 aa, synthetic construct
TLWVDPYEV

SEQ ID NO: 4033 - protein, 9 aa, synthetic construct
TLYNTEVLL

SEQ ID NO: 4034 - protein, 9 aa, synthetic construct
TMCPHILRY

SEQ ID NO: 4035 - protein, 9 aa, synthetic construct
TMDPKPLAY

SEQ ID NO: 4036 - protein, 10 aa, synthetic construct
TMFENVTRAL

SEQ ID NO: 4037 - protein, 8 aa, synthetic construct
TMLTSQYV

SEQ ID NO: 4038 - protein, 10 aa, synthetic construct
TNYDVEHTIK

SEQ ID NO: 4039 - protein, 10 aa, synthetic construct
TPAAVRELVL

SEQ ID NO: 4040 - protein, 9 aa, synthetic construct
TPADVFIVF

SEQ ID NO: 4041 - protein, 9 aa, synthetic construct
TPAGVQVIL

SEQ ID NO: 4042 - protein, 9 aa, synthetic construct
TPAPVPTSL

SEQ ID NO: 4043 - protein, 9 aa, synthetic construct
TPEDLNTIY

SEQ ID NO: 4044 - protein, 9 aa, synthetic construct
TPFAFVIDL

SEQ ID NO: 4045 - protein, 9 aa, synthetic construct
TPFKGGTLF

SEQ ID NO: 4046 - protein, 9 aa, synthetic construct
TPFLGQHGF

SEQ ID NO: 4047 - protein, 9 aa, synthetic construct
TPFQQPSGY

SEQ ID NO: 4048 - protein, 9 aa, synthetic construct
TPFSDSWYY

SEQ ID NO: 4049 - protein, 9 aa, synthetic construct
TPFSVGLVY

SEQ ID NO: 4050 - protein, 9 aa, synthetic construct
TPFVEGLSY

SEQ ID NO: 4051 - protein, 9 aa, synthetic construct
TPGGTRIIY

SEQ ID NO: 4052 - protein, 11 aa, synthetic construct
TPGPAGEKGNK

SEQ ID NO: 4053 - protein, 9 aa, synthetic construct
TPGPPLGSF

SEQ ID NO: 4054 - protein, 9 aa, synthetic construct
TPGYVVTPH

SEQ ID NO: 4055 - protein, 9 aa, synthetic construct
TPHGLFILF

SEQ ID NO: 4056 - protein, 9 aa, synthetic construct
TPISEHAVF

SEQ ID NO: 4057 - protein, 9 aa, synthetic construct
TPITIFMEY

SEQ ID NO: 4058 - protein, 9 aa, synthetic construct
TPLDRVTEF

SEQ ID NO: 4059 - protein, 9 aa, synthetic construct
TPLEGDFAW

SEQ ID NO: 4060 - protein, 9 aa, synthetic construct
TPLEIDILY

SEQ ID NO: 4061 - protein, 9 aa, synthetic construct
TPLEQGVSF

SEQ ID NO: 4062 - protein, 9 aa, synthetic construct
TPLGGEIMF

SEQ ID NO: 4063 - protein, 8 aa, synthetic construct
TPLIADVY

SEQ ID NO: 4064 - protein, 10 aa, synthetic construct
TPLKEALEAY

SEQ ID NO: 4065 - protein, 11 aa, synthetic construct
TPLSQAIIHQY

SEQ ID NO: 4066 - protein, 9 aa, synthetic construct
TPLSSTVTL

SEQ ID NO: 4067 - protein, 9 aa, synthetic construct
TPLVDPSVY

SEQ ID NO: 4068 - protein, 9 aa, synthetic construct
TPMDLAVAL

SEQ ID NO: 4069 - protein, 8 aa, synthetic construct
TPMEVAVY

SEQ ID NO: 4070 - protein, 9 aa, synthetic construct
TPMFVVKAY

SEQ ID NO: 4071 - protein, 9 aa, synthetic construct
TPNDFCSFY

SEQ ID NO: 4072 - protein, 11 aa, synthetic construct
TPRGVEGELSF

SEQ ID NO: 4073 - protein, 9 aa, synthetic construct
TPRIELEEM

SEQ ID NO: 4074 - protein, 11 aa, synthetic construct
TPRSTVGVAVL

SEQ ID NO: 4075 - protein, 11 aa, synthetic construct
TPSLVKSTSQL

SEQ ID NO: 4076 - protein, 9 aa, synthetic construct
TPSPDIIVL

SEQ ID NO: 4077 - protein, 9 aa, synthetic construct
TPSSLYMEY

SEQ ID NO: 4078 - protein, 9 aa, synthetic construct
TPTGIKVVM

SEQ ID NO: 4079 - protein, 9 aa, synthetic construct
TPTLPSITY

SEQ ID NO: 4080 - protein, 9 aa, synthetic construct
TPTPFFHTF

SEQ ID NO: 4081 - protein, 9 aa, synthetic construct
TPTVTTPSL

SEQ ID NO: 4082 - protein, 11 aa, synthetic construct
TPVDDPMSLLY

SEQ ID NO: 4083 - protein, 9 aa, synthetic construct
TPVFNPTVF

SEQ ID NO: 4084 - protein, 9 aa, synthetic construct
TPVGDVFEL

SEQ ID NO: 4085 - protein, 9 aa, synthetic construct
TPVQGVWDM

SEQ ID NO: 4086 - protein, 9 aa, synthetic construct
TPYEAAVAL

SEQ ID NO: 4087 - protein, 10 aa, synthetic construct
TPYGGQFERM

SEQ ID NO: 4088 - protein, 9 aa, synthetic construct
TQDQDVDVK

SEQ ID NO: 4089 - protein, 8 aa, synthetic construct
TQFKAFLI

SEQ ID NO: 4090 - protein, 8 aa, synthetic construct
TQFKWIHI

SEQ ID NO: 4091 - protein, 8 aa, synthetic construct
TQFLPRTI

SEQ ID NO: 4092 - protein, 9 aa, synthetic construct
TQHPLLHTI

SEQ ID NO: 4093 - protein, 8 aa, synthetic construct
TQITTLII

SEQ ID NO: 4094 - protein, 9 aa, synthetic construct
TQKMKPLII

SEQ ID NO: 4095 - protein, 8 aa, synthetic construct
TQLGAFYI

SEQ ID NO: 4096 - protein, 11 aa, synthetic construct
TQLLNNMRSQY

SEQ ID NO: 4097 - protein, 9 aa, synthetic construct
TQMPDPKTF

SEQ ID NO: 4098 - protein, 9 aa, synthetic construct
TQQVILVQV

SEQ ID NO: 4099 - protein, 8 aa, synthetic construct
TQRVISFI

SEQ ID NO: 4100 - protein, 9 aa, synthetic construct
TQVIEISEY

SEQ ID NO: 4101 - protein, 8 aa, synthetic construct
TQVLIKLI

SEQ ID NO: 4102 - protein, 8 aa, synthetic construct
TQVVISRI

SEQ ID NO: 4103 - protein, 9 aa, synthetic construct
TQYIFNNMV

SEQ ID NO: 4104 - protein, 9 aa, synthetic construct
TQYKMTISM

SEQ ID NO: 4105 - protein, 9 aa, synthetic construct
TQYPHAVGK

SEQ ID NO: 4106 - protein, 8 aa, synthetic construct
TQYQPRVL

SEQ ID NO: 4107 - protein, 8 aa, synthetic construct
TQYRAMFV

SEQ ID NO: 4108 - protein, 8 aa, synthetic construct
TQYRIPDI

SEQ ID NO: 4109 - protein, 9 aa, synthetic construct
TRADLIFTV

SEQ ID NO: 4110 - protein, 9 aa, synthetic construct
TRCIAILYI

SEQ ID NO: 4111 - protein, 9 aa, synthetic construct
TRCPLVLKL

SEQ ID NO: 4112 - protein, 9 aa, synthetic construct
TRFDQVMKF

SEQ ID NO: 4113 - protein, 10 aa, synthetic construct
TRFFGEALEF

SEQ ID NO: 4114 - protein, 8 aa, synthetic construct
TRGPVVRL

SEQ ID NO: 4115 - protein, 9 aa, synthetic construct
TRIGHGFAL

SEQ ID NO: 4116 - protein, 10 aa, synthetic construct
TRIKGFIACF

SEQ ID NO: 4117 - protein, 10 aa, synthetic construct
TRILFFNTPK

SEQ ID NO: 4118 - protein, 9 aa, synthetic construct
TRINDIIEV

SEQ ID NO: 4119 - protein, 9 aa, synthetic construct
TRLGFFTTY

SEQ ID NO: 4120 - protein, 9 aa, synthetic construct
TRNFVIHRL

SEQ ID NO: 4121 - protein, 9 aa, synthetic construct
TRPPHVFAI

SEQ ID NO: 4122 - protein, 10 aa, synthetic construct
TRTFIVGAQM

SEQ ID NO: 4123 - protein, 9 aa, synthetic construct
TRVKAVRIL

SEQ ID NO: 4124 - protein, 9 aa, synthetic construct
TRYQGVNLY

SEQ ID NO: 4125 - protein, 9 aa, synthetic construct
TSDLQLSTY

SEQ ID NO: 4126 - protein, 9 aa, synthetic construct
TSFIFFNKV

SEQ ID NO: 4127 - protein, 8 aa, synthetic construct
TSLGHPSL

SEQ ID NO: 4128 - protein, 9 aa, synthetic construct
TSLSEYVSR

SEQ ID NO: 4129 - protein, 9 aa, synthetic construct
TSNPENTVF

SEQ ID NO: 4130 - protein, 8 aa, synthetic construct
TSPEALEI

SEQ ID NO: 4131 - protein, 9 aa, synthetic construct
TSPEIVTAL

SEQ ID NO: 4132 - protein, 8 aa, synthetic construct
TSPKALVI

SEQ ID NO: 4133 - protein, 9 aa, synthetic construct
TSPQFQQAL

SEQ ID NO: 4134 - protein, 9 aa, synthetic construct
TSPVINTSL

SEQ ID NO: 4135 - protein, 9 aa, synthetic construct
TSSPSILTL

SEQ ID NO: 4136 - protein, 9 aa, synthetic construct
TSTDISSLY

SEQ ID NO: 4137 - protein, 9 aa, synthetic construct
TSYPDPILL

SEQ ID NO: 4138 - protein, 10 aa, synthetic construct
TTDELEKLLY

SEQ ID NO: 4139 - protein, 8 aa, synthetic construct
TTDNANIL

SEQ ID NO: 4140 - protein, 9 aa, synthetic construct
TTDNANILL

SEQ ID NO: 4141 - protein, 9 aa, synthetic construct
TTEVVNELY

SEQ ID NO: 4142 - protein, 9 aa, synthetic construct
TTICCISSF

SEQ ID NO: 4143 - protein, 9 aa, synthetic construct
TTILGGDRR

SEQ ID NO: 4144 - protein, 8 aa, synthetic construct
TTKAISRW

SEQ ID NO: 4145 - protein, 11 aa, synthetic construct
TTPVLLAHGER

SEQ ID NO: 4146 - protein, 9 aa, synthetic construct
TTQLSLSFK

SEQ ID NO: 4147 - protein, 9 aa, synthetic construct
TTTTITSGF

SEQ ID NO: 4148 - protein, 9 aa, synthetic construct
TTVPHVFSK

SEQ ID NO: 4149 - protein, 9 aa, synthetic construct
TTYPNTYIF

SEQ ID NO: 4150 - protein, 9 aa, synthetic construct
TVAGAVVTY

SEQ ID NO: 4151 - protein, 9 aa, synthetic construct
TVATAVEQY

SEQ ID NO: 4152 - protein, 9 aa, synthetic construct
TVAVPLVGK

SEQ ID NO: 4153 - protein, 10 aa, synthetic construct
TVAVPLVGKL

SEQ ID NO: 4154 - protein, 9 aa, synthetic construct
TVAVVVTFY

SEQ ID NO: 4155 - protein, 9 aa, synthetic construct
TVFEHTFHV

SEQ ID NO: 4156 - protein, 9 aa, synthetic construct
TVFREVVSF

SEQ ID NO: 4157 - protein, 8 aa, synthetic construct
TVGLIRNL

SEQ ID NO: 4158 - protein, 9 aa, synthetic construct
TVIDQIPFL

SEQ ID NO: 4159 - protein, 9 aa, synthetic construct
TVIEPLKGY

SEQ ID NO: 4160 - protein, 9 aa, synthetic construct
TVIPNSHVY

SEQ ID NO: 4161 - protein, 9 aa, synthetic construct
TVKDGVTLY

SEQ ID NO: 4162 - protein, 9 aa, synthetic construct
TVKEVLPAL

SEQ ID NO: 4163 - protein, 9 aa, synthetic construct
TVLATVQAL

SEQ ID NO: 4164 - protein, 9 aa, synthetic construct
TVLDLAVVL

SEQ ID NO: 4165 - protein, 9 aa, synthetic construct
TVLELVTQY

SEQ ID NO: 4166 - protein, 11 aa, synthetic construct
TVLFAGQHIAK

SEQ ID NO: 4167 - protein, 9 aa, synthetic construct
TVLTPMPAY

SEQ ID NO: 4168 - protein, 9 aa, synthetic construct
TVMDVVEYF

SEQ ID NO: 4169 - protein, 9 aa, synthetic construct
TVMKFVPRY

SEQ ID NO: 4170 - protein, 9 aa, synthetic construct
TVNTMNLPK

SEQ ID NO: 4171 - protein, 9 aa, synthetic construct
TVPASFSSL

SEQ ID NO: 4172 - protein, 9 aa, synthetic construct
TVPFTVESL

SEQ ID NO: 4173 - protein, 8 aa, synthetic construct
TVPHVFSK

SEQ ID NO: 4174 - protein, 9 aa, synthetic construct
TVPLPASQL

SEQ ID NO: 4175 - protein, 9 aa, synthetic construct
TVSALCQAY

SEQ ID NO: 4176 - protein, 9 aa, synthetic construct
TVSDAILRY

SEQ ID NO: 4177 - protein, 11 aa, synthetic construct
TVSEVIQGLLK

SEQ ID NO: 4178 - protein, 9 aa, synthetic construct
TVSSVNEAF

SEQ ID NO: 4179 - protein, 8 aa, synthetic construct
TVTAMDVV

SEQ ID NO: 4180 - protein, 9 aa, synthetic construct
TVTAMDVVY

SEQ ID NO: 4181 - protein, 9 aa, synthetic construct
TVTAVAITF

SEQ ID NO: 4182 - protein, 9 aa, synthetic construct
TVVRNLEAY

SEQ ID NO: 4183 - protein, 8 aa, synthetic construct
TVVYFPVR

SEQ ID NO: 4184 - protein, 9 aa, synthetic construct
TWDDAFATF

SEQ ID NO: 4185 - protein, 9 aa, synthetic construct
TYDLPGNFL

SEQ ID NO: 4186 - protein, 9 aa, synthetic construct
TYDYGGFTM

SEQ ID NO: 4187 - protein, 11 aa, synthetic construct
TYFQAKIRALK

SEQ ID NO: 4188 - protein, 9 aa, synthetic construct
TYGEIFEKF

SEQ ID NO: 4189 - protein, 9 aa, synthetic construct
TYINHVVSV

SEQ ID NO: 4190 - protein, 9 aa, synthetic construct
TYINPFVSF

SEQ ID NO: 4191 - protein, 9 aa, synthetic construct
TYISWKEEL

SEQ ID NO: 4192 - protein, 9 aa, synthetic construct
TYLDHSTQK

SEQ ID NO: 4193 - protein, 9 aa, synthetic construct
TYLDIFRDF

SEQ ID NO: 4194 - protein, 9 aa, synthetic construct
TYLEVINTV

SEQ ID NO: 4195 - protein, 9 aa, synthetic construct
TYLPQTYII

SEQ ID NO: 4196 - protein, 9 aa, synthetic construct
TYLSIIHSL

SEQ ID NO: 4197 - protein, 9 aa, synthetic construct
TYQRWQFTL

SEQ ID NO: 4198 - protein, 9 aa, synthetic construct
TYVSGTLRF

SEQ ID NO: 4199 - protein, 10 aa, synthetic construct
VAAAIAGYVF

SEQ ID NO: 4200 - protein, 9 aa, synthetic construct
VAAPLFELY

SEQ ID NO: 4201 - protein, 9 aa, synthetic construct
VADPYVVIM

SEQ ID NO: 4202 - protein, 9 aa, synthetic construct
VAFKKTFSY

SEQ ID NO: 4203 - protein, 9 aa, synthetic construct
VAFTPEGER

SEQ ID NO: 4204 - protein, 9 aa, synthetic construct
VAFVGGFSY

SEQ ID NO: 4205 - protein, 11 aa, synthetic construct
VAGGGGGFGAA

SEQ ID NO: 4206 - protein, 9 aa, synthetic construct
VAGPALEAL

SEQ ID NO: 4207 - protein, 10 aa, synthetic construct
VALHNLINNK

SEQ ID NO: 4208 - protein, 9 aa, synthetic construct
VALLVETQM

SEQ ID NO: 4209 - protein, 9 aa, synthetic construct
VALPTEAEF

SEQ ID NO: 4210 - protein, 9 aa, synthetic construct
VALPVFLVI

SEQ ID NO: 4211 - protein, 9 aa, synthetic construct
VAMKFAQVF

SEQ ID NO: 4212 - protein, 9 aa, synthetic construct
VAPAYGVYL

SEQ ID NO: 4213 - protein, 10 aa, synthetic construct
VAPEPCPQPL

SEQ ID NO: 4214 - protein, 9 aa, synthetic construct
VAPESFEYI

SEQ ID NO: 4215 - protein, 9 aa, synthetic construct
VAPFGSAAL

SEQ ID NO: 4216 - protein, 11 aa, synthetic construct
VAPGKDLTKTL

SEQ ID NO: 4217 - protein, 9 aa, synthetic construct
VAPGPVIGL

SEQ ID NO: 4218 - protein, 9 aa, synthetic construct
VAPGTGIDL

SEQ ID NO: 4219 - protein, 9 aa, synthetic construct
VAPLCQITV

SEQ ID NO: 4220 - protein, 9 aa, synthetic construct
VAPPGVAAL

SEQ ID NO: 4221 - protein, 9 aa, synthetic construct
VAPSAVAGK

SEQ ID NO: 4222 - protein, 8 aa, synthetic construct
VAPSAVNL

SEQ ID NO: 4223 - protein, 9 aa, synthetic construct
VAPSFGTLL

SEQ ID NO: 4224 - protein, 9 aa, synthetic construct
VAPTSGPAL

SEQ ID NO: 4225 - protein, 9 aa, synthetic construct
VARPDVVEM

SEQ ID NO: 4226 - protein, 9 aa, synthetic construct
VASGMILVM

SEQ ID NO: 4227 - protein, 9 aa, synthetic construct
VASSLYDIL

SEQ ID NO: 4228 - protein, 9 aa, synthetic construct
VATDHVAFL

SEQ ID NO: 4229 - protein, 8 aa, synthetic construct
VAVPLVGK

SEQ ID NO: 4230 - protein, 9 aa, synthetic construct
VAWDIPITY

SEQ ID NO: 4231 - protein, 9 aa, synthetic construct
VAYDSDYAL

SEQ ID NO: 4232 - protein, 9 aa, synthetic construct
VAYGKGTYF

SEQ ID NO: 4233 - protein, 9 aa, synthetic construct
VAYKDFIYF

SEQ ID NO: 4234 - protein, 9 aa, synthetic construct
VAYPCALLY

SEQ ID NO: 4235 - protein, 9 aa, synthetic construct
VAYVSSVAL

SEQ ID NO: 4236 - protein, 9 aa, synthetic construct
VCNGKIYIL

SEQ ID NO: 4237 - protein, 11 aa, synthetic construct
VDHILAGSFET

SEQ ID NO: 4238 - protein, 9 aa, synthetic construct
VDLVPWLKI

SEQ ID NO: 4239 - protein, 9 aa, synthetic construct
VEAGDAIAL

SEQ ID NO: 4240 - protein, 9 aa, synthetic construct
VEALPLVEA

SEQ ID NO: 4241 - protein, 9 aa, synthetic construct
VEEVHQLSR

SEQ ID NO: 4242 - protein, 9 aa, synthetic construct
VEFENIDSA

SEQ ID NO: 4243 - protein, 9 aa, synthetic construct
VEFGGFNQN

SEQ ID NO: 4244 - protein, 9 aa, synthetic construct
VEFGNFNNL

SEQ ID NO: 4245 - protein, 9 aa, synthetic construct
VEFNFGQRA

SEQ ID NO: 4246 - protein, 9 aa, synthetic construct
VEFNGKLLA

SEQ ID NO: 4247 - protein, 10 aa, synthetic construct
VEFNGKLLAS

SEQ ID NO: 4248 - protein, 9 aa, synthetic construct
VEGDPIVAL

SEQ ID NO: 4249 - protein, 9 aa, synthetic construct
VEGPPAWEA

SEQ ID NO: 4250 - protein, 9 aa, synthetic construct
VEGSLIVEK

SEQ ID NO: 4251 - protein, 9 aa, synthetic construct
VEHDFILQA

SEQ ID NO: 4252 - protein, 9 aa, synthetic construct
VEIAYSDVA

SEQ ID NO: 4253 - protein, 8 aa, synthetic construct
VEIDPEIQ

SEQ ID NO: 4254 - protein, 9 aa, synthetic construct
VEIGVVAVK

SEQ ID NO: 4255 - protein, 9 aa, synthetic construct
VEIPATVTA

SEQ ID NO: 4256 - protein, 10 aa, synthetic construct
VELDNQIVTA

SEQ ID NO: 4257 - protein, 8 aa, synthetic construct
VELVHQQK

SEQ ID NO: 4258 - protein, 9 aa, synthetic construct
VENLPSLSA

SEQ ID NO: 4259 - protein, 9 aa, synthetic construct
VESGLKTIL

SEQ ID NO: 4260 - protein, 9 aa, synthetic construct
VESPVICKI

SEQ ID NO: 4261 - protein, 9 aa, synthetic construct
VETVYTHVL

SEQ ID NO: 4262 - protein, 9 aa, synthetic construct
VEVEVTTAP

SEQ ID NO: 4263 - protein, 9 aa, synthetic construct
VEVPETPKA

SEQ ID NO: 4264 - protein, 9 aa, synthetic construct
VEVRFVSSA

SEQ ID NO: 4265 - protein, 9 aa, synthetic construct
VEYEVPEAA

SEQ ID NO: 4266 - protein, 8 aa, synthetic construct
VEYLLKKV

SEQ ID NO: 4267 - protein, 9 aa, synthetic construct
VFAEKITSL

SEQ ID NO: 4268 - protein, 9 aa, synthetic construct
VFCPVKEAL

SEQ ID NO: 4269 - protein, 9 aa, synthetic construct
VFDAFLNMM

SEQ ID NO: 4270 - protein, 9 aa, synthetic construct
VFDDMINLL

SEQ ID NO: 4271 - protein, 9 aa, synthetic construct
VFDFCEHDL

SEQ ID NO: 4272 - protein, 8 aa, synthetic construct
VFDLAQTL

SEQ ID NO: 4273 - protein, 10 aa, synthetic construct
VFDMGAEVGF

SEQ ID NO: 4274 - protein, 10 aa, synthetic construct
VFDVLDGEEM

SEQ ID NO: 4275 - protein, 10 aa, synthetic construct
VFDVTAPNTF

SEQ ID NO: 4276 - protein, 11 aa, synthetic construct
VFEMIAKEELE

SEQ ID NO: 4277 - protein, 9 aa, synthetic construct
VFIDKQTNL

SEQ ID NO: 4278 - protein, 11 aa, synthetic construct
VFIEGADAETF

SEQ ID NO: 4279 - protein, 11 aa, synthetic construct
VFIHAVPVEER

SEQ ID NO: 4280 - protein, 8 aa, synthetic construct
VFIKAVHV

SEQ ID NO: 4281 - protein, 8 aa, synthetic construct
VFLPSHSL

SEQ ID NO: 4282 - protein, 9 aa, synthetic construct
VFSTVVIHF

SEQ ID NO: 4283 - protein, 10 aa, synthetic construct
VFYTCTNCKF

SEQ ID NO: 4284 - protein, 8 aa, synthetic construct
VGLLIGPR

SEQ ID NO: 4285 - protein, 11 aa, synthetic construct
VGLPAAGKTTW

SEQ ID NO: 4286 - protein, 10 aa, synthetic construct
VGPGGEITEL

SEQ ID NO: 4287 - protein, 9 aa, synthetic construct
VGPPAGSPF

SEQ ID NO: 4288 - protein, 9 aa, synthetic construct
VGPYSTTVL

SEQ ID NO: 4289 - protein, 10 aa, synthetic construct
VGSEHYDVAR

SEQ ID NO: 4290 - protein, 8 aa, synthetic construct
VGVNLPQK

SEQ ID NO: 4291 - protein, 8 aa, synthetic construct
VGYRVTQI

SEQ ID NO: 4292 - protein, 8 aa, synthetic construct
VIDNPNYK

SEQ ID NO: 4293 - protein, 9 aa, synthetic construct
VIFGGLTGY

SEQ ID NO: 4294 - protein, 9 aa, synthetic construct
VIFGGVIGY

SEQ ID NO: 4295 - protein, 9 aa, synthetic construct
VIIGSTHVL

SEQ ID NO: 4296 - protein, 11 aa, synthetic construct
VILPPLSPYFK

SEQ ID NO: 4297 - protein, 9 aa, synthetic construct
VIPSTPLAI

SEQ ID NO: 4298 - protein, 9 aa, synthetic construct
VIPTNVPEL

SEQ ID NO: 4299 - protein, 9 aa, synthetic construct
VIQDFINAL

SEQ ID NO: 4300 - protein, 9 aa, synthetic construct
VIYPARISL

SEQ ID NO: 4301 - protein, 9 aa, synthetic construct
VIYPQSASY

SEQ ID NO: 4302 - protein, 9 aa, synthetic construct
VKFGEVISY

SEQ ID NO: 4303 - protein, 9 aa, synthetic construct
VLAANHFGR

SEQ ID NO: 4304 - protein, 10 aa, synthetic construct
VLAGALLEEA

SEQ ID NO: 4305 - protein, 9 aa, synthetic construct
VLAHLEEER

SEQ ID NO: 4306 - protein, 9 aa, synthetic construct
VLDDKLYVV

SEQ ID NO: 4307 - protein, 9 aa, synthetic construct
VLDDTNHER

SEQ ID NO: 4308 - protein, 9 aa, synthetic construct
VLDPYLLKY

SEQ ID NO: 4309 - protein, 10 aa, synthetic construct
VLFAGQHIAK

SEQ ID NO: 4310 - protein, 10 aa, synthetic construct
VLFAGQHISK

SEQ ID NO: 4311 - protein, 9 aa, synthetic construct
VLFGVETHV

SEQ ID NO: 4312 - protein, 9 aa, synthetic construct
VLHPYPTQI

SEQ ID NO: 4313 - protein, 9 aa, synthetic construct
VLIGGKPDR

SEQ ID NO: 4314 - protein, 9 aa, synthetic construct
VLIPKLPQL

SEQ ID NO: 4315 - protein, 9 aa, synthetic construct
VLIPQSDLR

SEQ ID NO: 4316 - protein, 9 aa, synthetic construct
VLLGGVASL

SEQ ID NO: 4317 - protein, 9 aa, synthetic construct
VLLGKVYVV

SEQ ID NO: 4318 - protein, 9 aa, synthetic construct
VLLPAASEL

SEQ ID NO: 4319 - protein, 10 aa, synthetic construct
VLLPFIAYYM

SEQ ID NO: 4320 - protein, 11 aa, synthetic construct
VLLSDSNLHDA

SEQ ID NO: 4321 - protein, 9 aa, synthetic construct
VLLSHLSYL

SEQ ID NO: 4322 - protein, 9 aa, synthetic construct
VLMLQEPLL

SEQ ID NO: 4323 - protein, 9 aa, synthetic construct
VLPAFTSNL

SEQ ID NO: 4324 - protein, 9 aa, synthetic construct
VLPEHVSVL

SEQ ID NO: 4325 - protein, 11 aa, synthetic construct
VLQELDNPGAK

SEQ ID NO: 4326 - protein, 8 aa, synthetic construct
VLRPGTAL

SEQ ID NO: 4327 - protein, 10 aa, synthetic construct
VLSSSHSYQR

SEQ ID NO: 4328 - protein, 9 aa, synthetic construct
VLWDRTFSL

SEQ ID NO: 4329 - protein, 9 aa, synthetic construct
VLYDRPLKI

SEQ ID NO: 4330 - protein, 10 aa, synthetic construct
VLYEGIKVGK

SEQ ID NO: 4331 - protein, 9 aa, synthetic construct
VMDSKIVQV

SEQ ID NO: 4332 - protein, 8 aa, synthetic construct
VMGLILVI

SEQ ID NO: 4333 - protein, 9 aa, synthetic construct
VMGNNPADL

SEQ ID NO: 4334 - protein, 9 aa, synthetic construct
VMPYIKTSL

SEQ ID NO: 4335 - protein, 9 aa, synthetic construct
VMSKLASFL

SEQ ID NO: 4336 - protein, 9 aa, synthetic construct
VNAIIEHVR

SEQ ID NO: 4337 - protein, 10 aa, synthetic construct
VNGLTLGGQK

SEQ ID NO: 4338 - protein, 11 aa, synthetic construct
VNITLGKESRE

SEQ ID NO: 4339 - protein, 9 aa, synthetic construct
VNPLKHGIV

SEQ ID NO: 4340 - protein, 8 aa, synthetic construct
VNVIGMHK

SEQ ID NO: 4341 - protein, 10 aa, synthetic construct
VPAFLKNQEF

SEQ ID NO: 4342 - protein, 11 aa, synthetic construct
VPALPKSLISL

SEQ ID NO: 4343 - protein, 9 aa, synthetic construct
VPASFSSLY

SEQ ID NO: 4344 - protein, 9 aa, synthetic construct
VPAVPTVGF

SEQ ID NO: 4345 - protein, 10 aa, synthetic construct
VPCTLEQDHF

SEQ ID NO: 4346 - protein, 11 aa, synthetic construct
VPDSSGPERIL

SEQ ID NO: 4347 - protein, 11 aa, synthetic construct
VPDTSRIYVAL

SEQ ID NO: 4348 - protein, 11 aa, synthetic construct
VPEAASTLVSM

SEQ ID NO: 4349 - protein, 11 aa, synthetic construct
VPEMSVVGTSV

SEQ ID NO: 4350 - protein, 10 aa, synthetic construct
VPFDGDDIQL

SEQ ID NO: 4351 - protein, 9 aa, synthetic construct
VPFDQFIQL

SEQ ID NO: 4352 - protein, 9 aa, synthetic construct
VPFETSCRY

SEQ ID NO: 4353 - protein, 9 aa, synthetic construct
VPFHSDLGY

SEQ ID NO: 4354 - protein, 11 aa, synthetic construct
VPFLDHRFSSY

SEQ ID NO: 4355 - protein, 9 aa, synthetic construct
VPFNIPLEF

SEQ ID NO: 4356 - protein, 8 aa, synthetic construct
VPFTPIEF

SEQ ID NO: 4357 - protein, 10 aa, synthetic construct
VPGLFEGDEY

SEQ ID NO: 4358 - protein, 9 aa, synthetic construct
VPGPTGLHY

SEQ ID NO: 4359 - protein, 11 aa, synthetic construct
VPHPNWPNHTL

SEQ ID NO: 4360 - protein, 9 aa, synthetic construct
VPIPTVNQY

SEQ ID NO: 4361 - protein, 9 aa, synthetic construct
VPKSILNSV

SEQ ID NO: 4362 - protein, 11 aa, synthetic construct
VPLDEKLLPQL

SEQ ID NO: 4363 - protein, 10 aa, synthetic construct
VPLEEAAQEY

SEQ ID NO: 4364 - protein, 9 aa, synthetic construct
VPLGMTVTF

SEQ ID NO: 4365 - protein, 9 aa, synthetic construct
VPLPIQIIF

SEQ ID NO: 4366 - protein, 9 aa, synthetic construct
VPLVREITF

SEQ ID NO: 4367 - protein, 9 aa, synthetic construct
VPMEEATDF

SEQ ID NO: 4368 - protein, 9 aa, synthetic construct
VPNKVIQCF

SEQ ID NO: 4369 - protein, 9 aa, synthetic construct
VPNQKRLTL

SEQ ID NO: 4370 - protein, 10 aa, synthetic construct
VPNQKRLTLL

SEQ ID NO: 4371 - protein, 9 aa, synthetic construct
VPPLFVIEF

SEQ ID NO: 4372 - protein, 9 aa, synthetic construct
VPRIQLEEY

SEQ ID NO: 4373 - protein, 9 aa, synthetic construct
VPSPAQIMY

SEQ ID NO: 4374 - protein, 9 aa, synthetic construct
VPTELALLY

SEQ ID NO: 4375 - protein, 9 aa, synthetic construct
VPTTGIIEY

SEQ ID NO: 4376 - protein, 9 aa, synthetic construct
VPVDVVVNM

SEQ ID NO: 4377 - protein, 9 aa, synthetic construct
VPVEEPIAF

SEQ ID NO: 4378 - protein, 10 aa, synthetic construct
VPVEGDEVTY

SEQ ID NO: 4379 - protein, 9 aa, synthetic construct
VPVFLLTDY

SEQ ID NO: 4380 - protein, 10 aa, synthetic construct
VPVGGELPTY

SEQ ID NO: 4381 - protein, 9 aa, synthetic construct
VPVPPLPEY

SEQ ID NO: 4382 - protein, 9 aa, synthetic construct
VPVSVVECF

SEQ ID NO: 4383 - protein, 11 aa, synthetic construct
VPVSVVGIFSY

SEQ ID NO: 4384 - protein, 9 aa, synthetic construct
VPVWIIHYY

SEQ ID NO: 4385 - protein, 10 aa, synthetic construct
VPWHEEVVQF

SEQ ID NO: 4386 - protein, 9 aa, synthetic construct
VPYPDITNF

SEQ ID NO: 4387 - protein, 8 aa, synthetic construct
VQEIVSVY

SEQ ID NO: 4388 - protein, 10 aa, synthetic construct
VQFDGTNSAF

SEQ ID NO: 4389 - protein, 9 aa, synthetic construct
VQFPSRKSV

SEQ ID NO: 4390 - protein, 9 aa, synthetic construct
VQIGDIVTV

SEQ ID NO: 4391 - protein, 9 aa, synthetic construct
VQKFFLEEI

SEQ ID NO: 4392 - protein, 9 aa, synthetic construct
VQKQWTALI

SEQ ID NO: 4393 - protein, 8 aa, synthetic construct
VQKTTLVI

SEQ ID NO: 4394 - protein, 9 aa, synthetic construct
VQLELIQTI

SEQ ID NO: 4395 - protein, 9 aa, synthetic construct
VQPRNWLLF

SEQ ID NO: 4396 - protein, 9 aa, synthetic construct
VQQLVLRTV

SEQ ID NO: 4397 - protein, 8 aa, synthetic construct
VQRLVESI

SEQ ID NO: 4398 - protein, 8 aa, synthetic construct
VQTTQIVI

SEQ ID NO: 4399 - protein, 8 aa, synthetic construct
VQVLIEHI

SEQ ID NO: 4400 - protein, 8 aa, synthetic construct
VQYKFSHL

SEQ ID NO: 4401 - protein, 9 aa, synthetic construct
VQYNMKIVI

SEQ ID NO: 4402 - protein, 9 aa, synthetic construct
VRAEMPNQL

SEQ ID NO: 4403 - protein, 10 aa, synthetic construct
VRAIPVDIGF

SEQ ID NO: 4404 - protein, 9 aa, synthetic construct
VRAVLHLLL

SEQ ID NO: 4405 - protein, 11 aa, synthetic construct
VRFKYPKLISY

SEQ ID NO: 4406 - protein, 10 aa, synthetic construct
VRFNVLKVTK

SEQ ID NO: 4407 - protein, 9 aa, synthetic construct
VRFQGPASF

SEQ ID NO: 4408 - protein, 9 aa, synthetic construct
VRIGLTLLL

SEQ ID NO: 4409 - protein, 9 aa, synthetic construct
VRKNIEVRL

SEQ ID NO: 4410 - protein, 9 aa, synthetic construct
VRLPLLSPK

SEQ ID NO: 4411 - protein, 9 aa, synthetic construct
VRLPYPLQM

SEQ ID NO: 4412 - protein, 9 aa, synthetic construct
VRNNIAYGL

SEQ ID NO: 4413 - protein, 9 aa, synthetic construct
VRPDNTYEV

SEQ ID NO: 4414 - protein, 11 aa, synthetic construct
VRSGARSVGGA

SEQ ID NO: 4415 - protein, 9 aa, synthetic construct
VRTPYTMSY

SEQ ID NO: 4416 - protein, 9 aa, synthetic construct
VRWDYQPDI

SEQ ID NO: 4417 - protein, 9 aa, synthetic construct
VRWPGVKLL

SEQ ID NO: 4418 - protein, 10 aa, synthetic construct
VSAAGLVQGL

SEQ ID NO: 4419 - protein, 9 aa, synthetic construct
VSAPPMPSV

SEQ ID NO: 4420 - protein, 10 aa, synthetic construct
VSARSVSGAL

SEQ ID NO: 4421 - protein, 8 aa, synthetic construct
VSASQDGK

SEQ ID NO: 4422 - protein, 9 aa, synthetic construct
VSCRITDLY

SEQ ID NO: 4423 - protein, 9 aa, synthetic construct
VSDGNFSNY

SEQ ID NO: 4424 - protein, 10 aa, synthetic construct
VSDGNFSNYY

SEQ ID NO: 4425 - protein, 10 aa, synthetic construct
VSDLEADDVK

SEQ ID NO: 4426 - protein, 9 aa, synthetic construct
VSDMVEDLY

SEQ ID NO: 4427 - protein, 10 aa, synthetic construct
VSDPLIGGTY

SEQ ID NO: 4428 - protein, 9 aa, synthetic construct
VSDPVGVLY

SEQ ID NO: 4429 - protein, 9 aa, synthetic construct
VSFSDVFFK

SEQ ID NO: 4430 - protein, 9 aa, synthetic construct
VSKTLPSTW

SEQ ID NO: 4431 - protein, 9 aa, synthetic construct
VSMPVFQSL

SEQ ID NO: 4432 - protein, 10 aa, synthetic construct
VSNLGIGHTR

SEQ ID NO: 4433 - protein, 9 aa, synthetic construct
VSPEVFVTL

SEQ ID NO: 4434 - protein, 9 aa, synthetic construct
VSPFSLLEL

SEQ ID NO: 4435 - protein, 9 aa, synthetic construct
VSPSFSAEL

SEQ ID NO: 4436 - protein, 9 aa, synthetic construct
VSPVVRVAV

SEQ ID NO: 4437 - protein, 9 aa, synthetic construct
VSSPTVQVF

SEQ ID NO: 4438 - protein, 10 aa, synthetic construct
VTDDLVCLVY

SEQ ID NO: 4439 - protein, 11 aa, synthetic construct
VTDGAILGKLY

SEQ ID NO: 4440 - protein, 9 aa, synthetic construct
VTDPRVVDL

SEQ ID NO: 4441 - protein, 10 aa, synthetic construct
VTDPSTLEQY

SEQ ID NO: 4442 - protein, 8 aa, synthetic construct
VTDTPVYV

SEQ ID NO: 4443 - protein, 11 aa, synthetic construct
VTEITDDLHFY

SEQ ID NO: 4444 - protein, 9 aa, synthetic construct
VTEKDLLLY

SEQ ID NO: 4445 - protein, 9 aa, synthetic construct
VTGIEMFHK

SEQ ID NO: 4446 - protein, 9 aa, synthetic construct
VTIIFIYEK

SEQ ID NO: 4447 - protein, 10 aa, synthetic construct
VTPLLMADVT

SEQ ID NO: 4448 - protein, 9 aa, synthetic construct
VTPTSLSSL

SEQ ID NO: 4449 - protein, 9 aa, synthetic construct
VTPVTGASL

SEQ ID NO: 4450 - protein, 10 aa, synthetic construct
VTTGDHGIIR

SEQ ID NO: 4451 - protein, 9 aa, synthetic construct
VTYNYPVHY

SEQ ID NO: 4452 - protein, 8 aa, synthetic construct
VTYTEHAK

SEQ ID NO: 4453 - protein, 9 aa, synthetic construct
VVAELVSSL

SEQ ID NO: 4454 - protein, 8 aa, synthetic construct
VVALMPEV

SEQ ID NO: 4455 - protein, 10 aa, synthetic construct
VVCPVSDILY

SEQ ID NO: 4456 - protein, 11 aa, synthetic construct
VVFVIDPGFAK

SEQ ID NO: 4457 - protein, 9 aa, synthetic construct
VVGAGGVGK

SEQ ID NO: 4458 - protein, 8 aa, synthetic construct
VVGPSSVL

SEQ ID NO: 4459 - protein, 9 aa, synthetic construct
VVIGNIGAL

SEQ ID NO: 4460 - protein, 9 aa, synthetic construct
VVINFDFPK

SEQ ID NO: 4461 - protein, 9 aa, synthetic construct
VVLIGGKPD

SEQ ID NO: 4462 - protein, 11 aa, synthetic construct
VVMTPVPLFSK

SEQ ID NO: 4463 - protein, 9 aa, synthetic construct
VVNESTVCL

SEQ ID NO: 4464 - protein, 8 aa, synthetic construct
VVPTSQSL

SEQ ID NO: 4465 - protein, 9 aa, synthetic construct
VVPVGGLSF

SEQ ID NO: 4466 - protein, 11 aa, synthetic construct
VVQDGITLITK

SEQ ID NO: 4467 - protein, 9 aa, synthetic construct
VVRVCEVTY

SEQ ID NO: 4468 - protein, 10 aa, synthetic construct
VVVDPIQSVK

SEQ ID NO: 4469 - protein, 9 aa, synthetic construct
VVVQPYNSL

SEQ ID NO: 4470 - protein, 11 aa, synthetic construct
VVYDGEHLGSF

SEQ ID NO: 4471 - protein, 9 aa, synthetic construct
VVYEKQMLY

SEQ ID NO: 4472 - protein, 9 aa, synthetic construct
VVYQYWNTK

SEQ ID NO: 4473 - protein, 11 aa, synthetic construct
VVYSGLENIKK

SEQ ID NO: 4474 - protein, 9 aa, synthetic construct
VWEETIILL

SEQ ID NO: 4475 - protein, 9 aa, synthetic construct
VYDETEVSL

SEQ ID NO: 4476 - protein, 8 aa, synthetic construct
VYDIAAKF

SEQ ID NO: 4477 - protein, 9 aa, synthetic construct
VYDLLKTNL

SEQ ID NO: 4478 - protein, 8 aa, synthetic construct
VYDNIGIL

SEQ ID NO: 4479 - protein, 9 aa, synthetic construct
VYDPATETW

SEQ ID NO: 4480 - protein, 8 aa, synthetic construct
VYDVAMKL

SEQ ID NO: 4481 - protein, 9 aa, synthetic construct
VYDVVELKF

SEQ ID NO: 4482 - protein, 10 aa, synthetic construct
VYFENVDDAK

SEQ ID NO: 4483 - protein, 9 aa, synthetic construct
VYFLPITPH

SEQ ID NO: 4484 - protein, 9 aa, synthetic construct
VYKDLVLLL

SEQ ID NO: 4485 - protein, 10 aa, synthetic construct
VYPEKLATKF

SEQ ID NO: 4486 - protein, 9 aa, synthetic construct
VYPEYVIQY

SEQ ID NO: 4487 - protein, 9 aa, synthetic construct
VYPQYVIEY

SEQ ID NO: 4488 - protein, 9 aa, synthetic construct
VYTSVVEEL

SEQ ID NO: 4489 - protein, 11 aa, synthetic construct
VYVDLGGSHVF

SEQ ID NO: 4490 - protein, 9 aa, synthetic construct
VYVQHPITF

SEQ ID NO: 4491 - protein, 9 aa, synthetic construct
VYVQNVVKL

SEQ ID NO: 4492 - protein, 9 aa, synthetic construct
WAAELSELY

SEQ ID NO: 4493 - protein, 9 aa, synthetic construct
WAPESAPLK

SEQ ID NO: 4494 - protein, 10 aa, synthetic construct
WDGHSGSMAR

SEQ ID NO: 4495 - protein, 9 aa, synthetic construct
WDQFDNLEK

SEQ ID NO: 4496 - protein, 9 aa, synthetic construct
WLAEKLPTL

SEQ ID NO: 4497 - protein, 8 aa, synthetic construct
WMIQVPRI

SEQ ID NO: 4498 - protein, 9 aa, synthetic construct
WPIDDHFTY

SEQ ID NO: 4499 - protein, 9 aa, synthetic construct
WPLPPIVDY

SEQ ID NO: 4500 - protein, 9 aa, synthetic construct
WSEPQSLCY

SEQ ID NO: 4501 - protein, 10 aa, synthetic construct
WSQHYHQGYY

SEQ ID NO: 4502 - protein, 9 aa, synthetic construct
WVDPYEVSY

SEQ ID NO: 4503 - protein, 10 aa, synthetic construct
WVDVAHLVLY

SEQ ID NO: 4504 - protein, 8 aa, synthetic construct
WVEESDKR

SEQ ID NO: 4505 - protein, 9 aa, synthetic construct
WVLETKEVY

SEQ ID NO: 4506 - protein, 10 aa, synthetic construct
YAADIFYSRY

SEQ ID NO: 4507 - protein, 9 aa, synthetic construct
YAANPGQLF

SEQ ID NO: 4508 - protein, 8 aa, synthetic construct
YAAQAHLK

SEQ ID NO: 4509 - protein, 10 aa, synthetic construct
YAFRNPNIGY

SEQ ID NO: 4510 - protein, 10 aa, synthetic construct
YAFSEDGEYF

SEQ ID NO: 4511 - protein, 9 aa, synthetic construct
YAIDNPLHY

SEQ ID NO: 4512 - protein, 9 aa, synthetic construct
YAKDDPLEF

SEQ ID NO: 4513 - protein, 9 aa, synthetic construct
YALDAAVTL

SEQ ID NO: 4514 - protein, 10 aa, synthetic construct
YALEEGIVRY

SEQ ID NO: 4515 - protein, 9 aa, synthetic construct
YALHQVTVY

SEQ ID NO: 4516 - protein, 8 aa, synthetic construct
YALLGRTL

SEQ ID NO: 4517 - protein, 9 aa, synthetic construct
YALNHTLSV

SEQ ID NO: 4518 - protein, 9 aa, synthetic construct
YALQSDVEY

SEQ ID NO: 4519 - protein, 9 aa, synthetic construct
YAPSTYAHL

SEQ ID NO: 4520 - protein, 9 aa, synthetic construct
YAPVGIMFL

SEQ ID NO: 4521 - protein, 9 aa, synthetic construct
YAPWCGQSI

SEQ ID NO: 4522 - protein, 9 aa, synthetic construct
YASDCASFF

SEQ ID NO: 4523 - protein, 9 aa, synthetic construct
YASPVVAFY

SEQ ID NO: 4524 - protein, 9 aa, synthetic construct
YATEVDVDF

SEQ ID NO: 4525 - protein, 9 aa, synthetic construct
YAVHEGLGL

SEQ ID NO: 4526 - protein, 10 aa, synthetic construct
YAVSSVAEAY

SEQ ID NO: 4527 - protein, 9 aa, synthetic construct
YAYTGRLEL

SEQ ID NO: 4528 - protein, 9 aa, synthetic construct
YAYVDQHDF

SEQ ID NO: 4529 - protein, 9 aa, synthetic construct
YCDPVVLTY

SEQ ID NO: 4530 - protein, 9 aa, synthetic construct
YCPPETAVL

SEQ ID NO: 4531 - protein, 9 aa, synthetic construct
YCYTGRVSL

SEQ ID NO: 4532 - protein, 10 aa, synthetic construct
YDAEISQIHQ

SEQ ID NO: 4533 - protein, 8 aa, synthetic construct
YDATHLVK

SEQ ID NO: 4534 - protein, 8 aa, synthetic construct
YDPVISKL

SEQ ID NO: 4535 - protein, 9 aa, synthetic construct
YEAMAFAEV

SEQ ID NO: 4536 - protein, 9 aa, synthetic construct
YEDGDDDMK

SEQ ID NO: 4537 - protein, 9 aa, synthetic construct
YEEAAMAIA

SEQ ID NO: 4538 - protein, 9 aa, synthetic construct
YEELVRMVL

SEQ ID NO: 4539 - protein, 9 aa, synthetic construct
YEHIVADDR

SEQ ID NO: 4540 - protein, 9 aa, synthetic construct
YEILNNPEL

SEQ ID NO: 4541 - protein, 9 aa, synthetic construct
YEKILFTEA

SEQ ID NO: 4542 - protein, 9 aa, synthetic construct
YELPVLRAA

SEQ ID NO: 4543 - protein, 8 aa, synthetic construct
YEMASHLR

SEQ ID NO: 4544 - protein, 9 aa, synthetic construct
YERINVPVP

SEQ ID NO: 4545 - protein, 9 aa, synthetic construct
YERIYNEIP

SEQ ID NO: 4546 - protein, 9 aa, synthetic construct
YERLFGTTV

SEQ ID NO: 4547 - protein, 11 aa, synthetic construct
YESHYALPLGR

SEQ ID NO: 4548 - protein, 9 aa, synthetic construct
YEVGEDPVL

SEQ ID NO: 4549 - protein, 9 aa, synthetic construct
YEVRLTQTV

SEQ ID NO: 4550 - protein, 10 aa, synthetic construct
YEWDAGDVGA

SEQ ID NO: 4551 - protein, 8 aa, synthetic construct
YEWDVAEA

SEQ ID NO: 4552 - protein, 9 aa, synthetic construct
YEYKFGFEL

SEQ ID NO: 4553 - protein, 9 aa, synthetic construct
YEYKVFGVL

SEQ ID NO: 4554 - protein, 9 aa, synthetic construct
YEYSGYNYL

SEQ ID NO: 4555 - protein, 9 aa, synthetic construct
YFATIIKEV

SEQ ID NO: 4556 - protein, 9 aa, synthetic construct
YFDDALEDF

SEQ ID NO: 4557 - protein, 9 aa, synthetic construct
YFDEILNKL

SEQ ID NO: 4558 - protein, 8 aa, synthetic construct
YFDEPVEL

SEQ ID NO: 4559 - protein, 9 aa, synthetic construct
YFDPQYFEF

SEQ ID NO: 4560 - protein, 9 aa, synthetic construct
YFEELITML

SEQ ID NO: 4561 - protein, 11 aa, synthetic construct
YFHVVIAGPQD

SEQ ID NO: 4562 - protein, 9 aa, synthetic construct
YGFQEKEAF

SEQ ID NO: 4563 - protein, 11 aa, synthetic construct
YGFRPDEPYYY

SEQ ID NO: 4564 - protein, 8 aa, synthetic construct
YGHKLPVI

SEQ ID NO: 4565 - protein, 11 aa, synthetic construct
YGSSSFGGSYG

SEQ ID NO: 4566 - protein, 11 aa, synthetic construct
YGTEVHTDTNK

SEQ ID NO: 4567 - protein, 10 aa, synthetic construct
YHLLEQVAPK

SEQ ID NO: 4568 - protein, 9 aa, synthetic construct
YIDEGRLVL

SEQ ID NO: 4569 - protein, 9 aa, synthetic construct
YIFKERESF

SEQ ID NO: 4570 - protein, 8 aa, synthetic construct
YIHVGAQL

SEQ ID NO: 4571 - protein, 9 aa, synthetic construct
YIIQNIPGF

SEQ ID NO: 4572 - protein, 9 aa, synthetic construct
YITERIIAV

SEQ ID NO: 4573 - protein, 8 aa, synthetic construct
YKPEVQLR

SEQ ID NO: 4574 - protein, 9 aa, synthetic construct
YKPVFVTEI

SEQ ID NO: 4575 - protein, 9 aa, synthetic construct
YLADIFTKL

SEQ ID NO: 4576 - protein, 9 aa, synthetic construct
YLAVESPFL

SEQ ID NO: 4577 - protein, 8 aa, synthetic construct
YLDAIKKF

SEQ ID NO: 4578 - protein, 9 aa, synthetic construct
YLDCGTLQY

SEQ ID NO: 4579 - protein, 9 aa, synthetic construct
YLDDPDLKY

SEQ ID NO: 4580 - protein, 9 aa, synthetic construct
YLDHNSFDY

SEQ ID NO: 4581 - protein, 9 aa, synthetic construct
YLDIGQVYY

SEQ ID NO: 4582 - protein, 8 aa, synthetic construct
YLGQVTTI

SEQ ID NO: 4583 - protein, 9 aa, synthetic construct
YLIPLLERL

SEQ ID NO: 4584 - protein, 9 aa, synthetic construct
YLLPDTKAY

SEQ ID NO: 4585 - protein, 9 aa, synthetic construct
YLPAGQSVL

SEQ ID NO: 4586 - protein, 9 aa, synthetic construct
YLPDFLDYF

SEQ ID NO: 4587 - protein, 9 aa, synthetic construct
YLPEELSAL

SEQ ID NO: 4588 - protein, 11 aa, synthetic construct
YLPERDVYESL

SEQ ID NO: 4589 - protein, 8 aa, synthetic construct
YLPLAHVL

SEQ ID NO: 4590 - protein, 9 aa, synthetic construct
YLSDNVHLV

SEQ ID NO: 4591 - protein, 9 aa, synthetic construct
YLSQDTVSV

SEQ ID NO: 4592 - protein, 9 aa, synthetic construct
YLYITKVLK

SEQ ID NO: 4593 - protein, 9 aa, synthetic construct
YLYTDSISL

SEQ ID NO: 4594 - protein, 9 aa, synthetic construct
YLYVTKVLK

SEQ ID NO: 4595 - protein, 9 aa, synthetic construct
YMIDAGTEF

SEQ ID NO: 4596 - protein, 8 aa, synthetic construct
YMLVAIII

SEQ ID NO: 4597 - protein, 9 aa, synthetic construct
YMPPPYASL

SEQ ID NO: 4598 - protein, 9 aa, synthetic construct
YPAGFPMGY

SEQ ID NO: 4599 - protein, 9 aa, synthetic construct
YPALVVEKM

SEQ ID NO: 4600 - protein, 9 aa, synthetic construct
YPAQGVQQF

SEQ ID NO: 4601 - protein, 10 aa, synthetic construct
YPATIASIDF

SEQ ID NO: 4602 - protein, 9 aa, synthetic construct
YPCIPNHEL

SEQ ID NO: 4603 - protein, 10 aa, synthetic construct
YPDENGFDAF

SEQ ID NO: 4604 - protein, 9 aa, synthetic construct
YPDFTNPTM

SEQ ID NO: 4605 - protein, 8 aa, synthetic construct
YPDLIHIY

SEQ ID NO: 4606 - protein, 9 aa, synthetic construct
YPDLLPTDY

SEQ ID NO: 4607 - protein, 11 aa, synthetic construct
YPDPVSIIQKY

SEQ ID NO: 4608 - protein, 9 aa, synthetic construct
YPDSHLPTL

SEQ ID NO: 4609 - protein, 9 aa, synthetic construct
YPEDVAEEL

SEQ ID NO: 4610 - protein, 9 aa, synthetic construct
YPEDVPITL

SEQ ID NO: 4611 - protein, 9 aa, synthetic construct
YPEEIVRYY

SEQ ID NO: 4612 - protein, 9 aa, synthetic construct
YPEGVDVVY

SEQ ID NO: 4613 - protein, 9 aa, synthetic construct
YPENIVPSF

SEQ ID NO: 4614 - protein, 9 aa, synthetic construct
YPEPAPAAL

SEQ ID NO: 4615 - protein, 9 aa, synthetic construct
YPEPYPLVY

SEQ ID NO: 4616 - protein, 10 aa, synthetic construct
YPESEVIIKY

SEQ ID NO: 4617 - protein, 11 aa, synthetic construct
YPETLGRLLIL

SEQ ID NO: 4618 - protein, 8 aa, synthetic construct
YPFAADLY

SEQ ID NO: 4619 - protein, 10 aa, synthetic construct
YPFDSPQVMF

SEQ ID NO: 4620 - protein, 9 aa, synthetic construct
YPFENKREF

SEQ ID NO: 4621 - protein, 11 aa, synthetic construct
YPFHDSDPSAL

SEQ ID NO: 4622 - protein, 10 aa, synthetic construct
YPFIGDVHSL

SEQ ID NO: 4623 - protein, 10 aa, synthetic construct
YPFIISSESY

SEQ ID NO: 4624 - protein, 10 aa, synthetic construct
YPFNPPKVRF

SEQ ID NO: 4625 - protein, 10 aa, synthetic construct
YPFPVPPLLY

SEQ ID NO: 4626 - protein, 10 aa, synthetic construct
YPFRVGELEY

SEQ ID NO: 4627 - protein, 9 aa, synthetic construct
YPFSSEQKW

SEQ ID NO: 4628 - protein, 8 aa, synthetic construct
YPGAVTVA

SEQ ID NO: 4629 - protein, 9 aa, synthetic construct
YPGAVTVAW

SEQ ID NO: 4630 - protein, 9 aa, synthetic construct
YPGLILIDY

SEQ ID NO: 4631 - protein, 11 aa, synthetic construct
YPGPASLTQIY

SEQ ID NO: 4632 - protein, 9 aa, synthetic construct
YPGQPPVTY

SEQ ID NO: 4633 - protein, 10 aa, synthetic construct
YPIALTRAEM

SEQ ID NO: 4634 - protein, 11 aa, synthetic construct
YPIELHGIGKY

SEQ ID NO: 4635 - protein, 9 aa, synthetic construct
YPIPSGSYY

SEQ ID NO: 4636 - protein, 9 aa, synthetic construct
YPLDVQKEF

SEQ ID NO: 4637 - protein, 9 aa, synthetic construct
YPLDWELSY

SEQ ID NO: 4638 - protein, 9 aa, synthetic construct
YPLEDHTEF

SEQ ID NO: 4639 - protein, 9 aa, synthetic construct
YPLEDLPSL

SEQ ID NO: 4640 - protein, 10 aa, synthetic construct
YPLEVTKLIY

SEQ ID NO: 4641 - protein, 11 aa, synthetic construct
YPLGDIKIVDF

SEQ ID NO: 4642 - protein, 8 aa, synthetic construct
YPLNSYEL

SEQ ID NO: 4643 - protein, 11 aa, synthetic construct
YPLQISPVSSY

SEQ ID NO: 4644 - protein, 10 aa, synthetic construct
YPLTSPPTSY

SEQ ID NO: 4645 - protein, 9 aa, synthetic construct
YPNVNIHNF

SEQ ID NO: 4646 - protein, 8 aa, synthetic construct
YPPLNTIR

SEQ ID NO: 4647 - protein, 9 aa, synthetic construct
YPQEVIPTF

SEQ ID NO: 4648 - protein, 9 aa, synthetic construct
YPQPPSQSY

SEQ ID NO: 4649 - protein, 9 aa, synthetic construct
YPQQIEPSF

SEQ ID NO: 4650 - protein, 9 aa, synthetic construct
YPQVPSSGY

SEQ ID NO: 4651 - protein, 8 aa, synthetic construct
YPQYVIEY

SEQ ID NO: 4652 - protein, 9 aa, synthetic construct
YPSETTVKY

SEQ ID NO: 4653 - protein, 11 aa, synthetic construct
YPSETTVKYVF

SEQ ID NO: 4654 - protein, 9 aa, synthetic construct
YPSLNVTSF

SEQ ID NO: 4655 - protein, 11 aa, synthetic construct
YPSRIGSIINY

SEQ ID NO: 4656 - protein, 9 aa, synthetic construct
YPTPYPEDL

SEQ ID NO: 4657 - protein, 9 aa, synthetic construct
YPVDGLPDL

SEQ ID NO: 4658 - protein, 9 aa, synthetic construct
YPVDLGDKF

SEQ ID NO: 4659 - protein, 10 aa, synthetic construct
YPVEDFEASF

SEQ ID NO: 4660 - protein, 11 aa, synthetic construct
YPVGHPVDVSF

SEQ ID NO: 4661 - protein, 9 aa, synthetic construct
YPVPDVSTY

SEQ ID NO: 4662 - protein, 10 aa, synthetic construct
YPWVVDRVVF

SEQ ID NO: 4663 - protein, 9 aa, synthetic construct
YPWWEQQGF

SEQ ID NO: 4664 - protein, 9 aa, synthetic construct
YPYEAPPSY

SEQ ID NO: 4665 - protein, 10 aa, synthetic construct
YPYGEKQDEF

SEQ ID NO: 4666 - protein, 9 aa, synthetic construct
YPYNDSPEL

SEQ ID NO: 4667 - protein, 8 aa, synthetic construct
YPYTITEY

SEQ ID NO: 4668 - protein, 9 aa, synthetic construct
YQFTGIKKY

SEQ ID NO: 4669 - protein, 9 aa, synthetic construct
YQHIVTTLV

SEQ ID NO: 4670 - protein, 9 aa, synthetic construct
YQHLLVNSI

SEQ ID NO: 4671 - protein, 9 aa, synthetic construct
YQHMLANSI

SEQ ID NO: 4672 - protein, 10 aa, synthetic construct
YQIDADRVVY

SEQ ID NO: 4673 - protein, 8 aa, synthetic construct
YQLAVTKV

SEQ ID NO: 4674 - protein, 11 aa, synthetic construct
YQSKYEELQIT

SEQ ID NO: 4675 - protein, 10 aa, synthetic construct
YQTSVESVDF

SEQ ID NO: 4676 - protein, 9 aa, synthetic construct
YQYPRPLLI

SEQ ID NO: 4677 - protein, 9 aa, synthetic construct
YRFFLGNQF

SEQ ID NO: 4678 - protein, 9 aa, synthetic construct
YRHSGFLEV

SEQ ID NO: 4679 - protein, 9 aa, synthetic construct
YRIESYWTY

SEQ ID NO: 4680 - protein, 9 aa, synthetic construct
YRIGDLQAF

SEQ ID NO: 4681 - protein, 10 aa, synthetic construct
YRIKPEALKF

SEQ ID NO: 4682 - protein, 9 aa, synthetic construct
YRIKSSPVF

SEQ ID NO: 4683 - protein, 9 aa, synthetic construct
YRIPLNPYL

SEQ ID NO: 4684 - protein, 10 aa, synthetic construct
YRLDLEGNEY

SEQ ID NO: 4685 - protein, 9 aa, synthetic construct
YRNEFTAWY

SEQ ID NO: 4686 - protein, 9 aa, synthetic construct
YRNPCYVSY

SEQ ID NO: 4687 - protein, 10 aa, synthetic construct
YRPETGSWVF

SEQ ID NO: 4688 - protein, 8 aa, synthetic construct
YRPPELLL

SEQ ID NO: 4689 - protein, 9 aa, synthetic construct
YRWALGQVF

SEQ ID NO: 4690 - protein, 9 aa, synthetic construct
YRYMNPAIV

SEQ ID NO: 4691 - protein, 9 aa, synthetic construct
YSDLHAFYY

SEQ ID NO: 4692 - protein, 9 aa, synthetic construct
YSFLDKMSF

SEQ ID NO: 4693 - protein, 9 aa, synthetic construct
YSMISVVGF

SEQ ID NO: 4694 - protein, 9 aa, synthetic construct
YSPEFKDPL

SEQ ID NO: 4695 - protein, 11 aa, synthetic construct
YSPISITSALG

SEQ ID NO: 4696 - protein, 8 aa, synthetic construct
YSWLGETL

SEQ ID NO: 4697 - protein, 8 aa, synthetic construct
YSYTIITV

SEQ ID NO: 4698 - protein, 9 aa, synthetic construct
YTASIYQNY

SEQ ID NO: 4699 - protein, 9 aa, synthetic construct
YTAVVPLVY

SEQ ID NO: 4700 - protein, 10 aa, synthetic construct
YTAVVPLVYG

SEQ ID NO: 4701 - protein, 8 aa, synthetic construct
YTDELVEL

SEQ ID NO: 4702 - protein, 10 aa, synthetic construct
YTDFDGTRVY

SEQ ID NO: 4703 - protein, 9 aa, synthetic construct
YTDSYTDTY

SEQ ID NO: 4704 - protein, 9 aa, synthetic construct
YTDTYTEAY

SEQ ID NO: 4705 - protein, 9 aa, synthetic construct
YTSDYFISY

SEQ ID NO: 4706 - protein, 9 aa, synthetic construct
YTSPVNPAV

SEQ ID NO: 4707 - protein, 10 aa, synthetic construct
YTSYPMHDFY

SEQ ID NO: 4708 - protein, 9 aa, synthetic construct
YTVTDLVEY

SEQ ID NO: 4709 - protein, 10 aa, synthetic construct
YVADIEVDGK

SEQ ID NO: 4710 - protein, 11 aa, synthetic construct
YVADLENMVQY

SEQ ID NO: 4711 - protein, 9 aa, synthetic construct
YVADPGGSL

SEQ ID NO: 4712 - protein, 9 aa, synthetic construct
YVAPAYGVY

SEQ ID NO: 4713 - protein, 9 aa, synthetic construct
YVAPEILSY

SEQ ID NO: 4714 - protein, 10 aa, synthetic construct
YVCSECNQLY

SEQ ID NO: 4715 - protein, 9 aa, synthetic construct
YVDPQFLTY

SEQ ID NO: 4716 - protein, 9 aa, synthetic construct
YVDPVNKVL

SEQ ID NO: 4717 - protein, 9 aa, synthetic construct
YVDVAVGAF

SEQ ID NO: 4718 - protein, 10 aa, synthetic construct
YVFDGTNPPY

SEQ ID NO: 4719 - protein, 9 aa, synthetic construct
YVFEISETY

SEQ ID NO: 4720 - protein, 11 aa, synthetic construct
YVFFEKDFGDM

SEQ ID NO: 4721 - protein, 9 aa, synthetic construct
YVFGGTTGY

SEQ ID NO: 4722 - protein, 8 aa, synthetic construct
YVHMVTHF

SEQ ID NO: 4723 - protein, 9 aa, synthetic construct
YVHNDIFRY

SEQ ID NO: 4724 - protein, 10 aa, synthetic construct
YVHSFLSSGY

SEQ ID NO: 4725 - protein, 11 aa, synthetic construct
YVIDQGETDVY

SEQ ID NO: 4726 - protein, 9 aa, synthetic construct
YVILNILRF

SEQ ID NO: 4727 - protein, 10 aa, synthetic construct
YVNPANTHQF

SEQ ID NO: 4728 - protein, 9 aa, synthetic construct
YVPDTTISL

SEQ ID NO: 4729 - protein, 9 aa, synthetic construct
YVQDRVPSY

SEQ ID NO: 4730 - protein, 9 aa, synthetic construct
YVQPVCPSY

SEQ ID NO: 4731 - protein, 10 aa, synthetic construct
YVSDGNFSNY

SEQ ID NO: 4732 - protein, 9 aa, synthetic construct
YVVDLDDEY

SEQ ID NO: 4733 - protein, 10 aa, synthetic construct
YVYPDERTAL

SEQ ID NO: 4734 - protein, 9 aa, synthetic construct
YWMHVQNTF

SEQ ID NO: 4735 - protein, 8 aa, synthetic construct
YYDAIACL

SEQ ID NO: 4736 - protein, 8 aa, synthetic construct
YYDAIWHF

SEQ ID NO: 4737 - protein, 8 aa, synthetic construct
YYDFLVEV

SEQ ID NO: 4738 - protein, 9 aa, synthetic construct
YYDGKVMKL

SEQ ID NO: 4739 - protein, 9 aa, synthetic construct
YYDLVRTEI

SEQ ID NO: 4740 - protein, 9 aa, synthetic construct
YYDVPIATL

SEQ ID NO: 4741 - protein, 8 aa, synthetic construct
YYFSHDTD

SEQ ID NO: 4742 - protein, 11 aa, synthetic construct
YYHLLEQVAPK

SEQ ID NO: 4743 - protein, 9 aa, synthetic construct
YYISPRITF

SEQ ID NO: 4744 - protein, 10 aa, synthetic construct
YYITGNLETF

SEQ ID NO: 4745 - protein, 9 aa, synthetic construct
YYLTHGLYL

SEQ ID NO: 4746 - protein, 9 aa, synthetic construct
YYPEYKLLF

SEQ ID NO: 4747 - protein, 9 aa, synthetic construct
YYPEYKLLF

SEQ ID NO: 4748 - protein, 10 aa, synthetic construct
YTSLVNYNLW

SEQ ID NO: 4749 - protein, 9 aa, synthetic construct
YPSLREAAL

SEQ ID NO: 4750 - protein, 9 aa, synthetic construct
YPAGNVKEL

SEQ ID NO: 4751 - protein, 8 aa, synthetic construct
VLINRINE

SEQ ID NO: 4752 - protein, 9 aa, synthetic construct
VIKRKVVEF

SEQ ID NO: 4753 - protein, 9 aa, synthetic construct
TPSPAGPRL

SEQ ID NO: 4754 - protein, 10 aa, synthetic construct
SPSVSQLSVL

SEQ ID NO: 4755 - protein, 8 aa, synthetic construct
SLGPVVQV

SEQ ID NO: 4756 - protein, 9 aa, synthetic construct
RPKGLGLGF

SEQ ID NO: 4757 - protein, 9 aa, synthetic construct
RPDSRLLEL

SEQ ID NO: 4758 - protein, 9 aa, synthetic construct
RLLELHITM

SEQ ID NO: 4759 - protein, 8 aa, synthetic construct
QIMPKAGL

SEQ ID NO: 4760 - protein, 10 aa, synthetic construct
QALQDLLSEY

SEQ ID NO: 4761 - protein, 10 aa, synthetic construct
MTSAGVFNAG

SEQ ID NO: 4762 - protein, 9 aa, synthetic construct
LAGDVLVSM

SEQ ID NO: 4763 - protein, 9 aa, synthetic construct
KVLEYVIKV

SEQ ID NO: 4764 - protein, 9 aa, synthetic construct
KVLEHVVRV

SEQ ID NO: 4765 - protein, 11 aa, synthetic construct
KNVEITEQLAN

SEQ ID NO: 4766 - protein, 9 aa, synthetic construct
KMAELVHFL

SEQ ID NO: 4767 - protein, 9 aa, synthetic construct
KILDLETQL

SEQ ID NO: 4768 - protein, 11 aa, synthetic construct
IKYDKAWLMNS

SEQ ID NO: 4769 - protein, 9 aa, synthetic construct
HQLNICSKV

SEQ ID NO: 4770 - protein, 9 aa, synthetic construct
FPSSTSSSL

SEQ ID NO: 4771 - protein, 9 aa, synthetic construct
FPSLREAAL

SEQ ID NO: 4772 - protein, 9 aa, synthetic construct
FIDASRLVY

SEQ ID NO: 4773 - protein, 9 aa, synthetic construct
FEQEMATAA

SEQ ID NO: 4774 - protein, 9 aa, synthetic construct
EVLINRINE

SEQ ID NO: 4775 - protein, 9 aa, synthetic construct
EVDPIGHLY

SEQ ID NO: 4776 - protein, 10 aa, synthetic construct
APLPRPGAVL

SEQ ID NO: 4777 - protein, 10 aa, synthetic construct
ALLAGVSTQA

SEQ ID NO: 4778 - protein, 10 aa, synthetic construct
AAALPAAALW

SEQ ID NO: 4779 - protein, 9 aa, synthetic construct
AAAPAAGLL

SEQ ID NO: 4780 - protein, 9 aa, synthetic construct
AAPSVRGYL

SEQ ID NO: 4781 - protein, 9 aa, synthetic construct
AAWPGAPVF

SEQ ID NO: 4782 - protein, 10 aa, synthetic construct
AEPEHLLPVA

SEQ ID NO: 4783 - protein, 10 aa, synthetic construct
AGAHLEGGAK

SEQ ID NO: 4784 - protein, 9 aa, synthetic construct
ALAAVVTEV

SEQ ID NO: 4785 - protein, 9 aa, synthetic construct
ALYGGRILK

SEQ ID NO: 4786 - protein, 9 aa, synthetic construct
APAAAGAAL

SEQ ID NO: 4787 - protein, 9 aa, synthetic construct
APAGPVGVL

SEQ ID NO: 4788 - protein, 10 aa, synthetic construct
APGSDRLLGL

SEQ ID NO: 4789 - protein, 10 aa, synthetic construct
APKSSSGFSL

SEQ ID NO: 4790 - protein, 11 aa, synthetic construct
APRAAPPAGAF

SEQ ID NO: 4791 - protein, 10 aa, synthetic construct
APRAFLPLPV

SEQ ID NO: 4792 - protein, 9 aa, synthetic construct
APSGVGAAL

SEQ ID NO: 4793 - protein, 10 aa, synthetic construct
APVRSHGLVL

SEQ ID NO: 4794 - protein, 9 aa, synthetic construct
APYSPPITY

SEQ ID NO: 4795 - protein, 9 aa, synthetic construct
ARHPALPPL

SEQ ID NO: 4796 - protein, 11 aa, synthetic construct
AVLKPEAWSRK

SEQ ID NO: 4797 - protein, 10 aa, synthetic construct
AVPWCPAPAK

SEQ ID NO: 4798 - protein, 11 aa, synthetic construct
DAVLLFVLGGS

SEQ ID NO: 4799 - protein, 11 aa, synthetic construct
DIIAKTRLEVG

SEQ ID NO: 4800 - protein, 8 aa, synthetic construct
DLELHKVS

SEQ ID NO: 4801 - protein, 9 aa, synthetic construct
DTVARVFFY

SEQ ID NO: 4802 - protein, 9 aa, synthetic construct
DTVGFHNYY

SEQ ID NO: 4803 - protein, 9 aa, synthetic construct
ELVYPGAPF

SEQ ID NO: 4804 - protein, 8 aa, synthetic construct
EQFLDGGN

SEQ ID NO: 4805 - protein, 10 aa, synthetic construct
EVISSVAGGF

SEQ ID NO: 4806 - protein, 10 aa, synthetic construct
FLFQDFLRQA

SEQ ID NO: 4807 - protein, 8 aa, synthetic construct
FLIPQVLK

SEQ ID NO: 4808 - protein, 9 aa, synthetic construct
FLIQHLPLV

SEQ ID NO: 4809 - protein, 9 aa, synthetic construct
FQDPYTRSL

SEQ ID NO: 4810 - protein, 9 aa, synthetic construct
FTSPPSSSL

SEQ ID NO: 4811 - protein, 9 aa, synthetic construct
FVHLSGREI

SEQ ID NO: 4812 - protein, 11 aa, synthetic construct
GEFGGFYSVRG

SEQ ID NO: 4813 - protein, 8 aa, synthetic construct
GFCLFFTK

SEQ ID NO: 4814 - protein, 8 aa, synthetic construct
GIDGVSPK

SEQ ID NO: 4815 - protein, 10 aa, synthetic construct
GLGVLRKTAL

SEQ ID NO: 4816 - protein, 11 aa, synthetic construct
GLYSLSSVVTV

SEQ ID NO: 4817 - protein, 10 aa, synthetic construct
GPAALRLSAL

SEQ ID NO: 4818 - protein, 9 aa, synthetic construct
GQLGLTFQR

SEQ ID NO: 4819 - protein, 10 aa, synthetic construct
GRWGPVAHPF

SEQ ID NO: 4820 - protein, 11 aa, synthetic construct
GRWGPVAHPFR

SEQ ID NO: 4821 - protein, 9 aa, synthetic construct
GSSSPLPFR

SEQ ID NO: 4822 - protein, 9 aa, synthetic construct
GTISGGFFK

SEQ ID NO: 4823 - protein, 9 aa, synthetic construct
HPSLPVIKY

SEQ ID NO: 4824 - protein, 9 aa, synthetic construct
HVVSPTSPF

SEQ ID NO: 4825 - protein, 10 aa, synthetic construct
ICTIPAATCF

SEQ ID NO: 4826 - protein, 8 aa, synthetic construct
ILSIRSLP

SEQ ID NO: 4827 - protein, 9 aa, synthetic construct
ISDPGVQGY

SEQ ID NO: 4828 - protein, 11 aa, synthetic construct
ISRVGQRGKNI

SEQ ID NO: 4829 - protein, 9 aa, synthetic construct
KIWERIWSA

SEQ ID NO: 4830 - protein, 9 aa, synthetic construct
KLTYIYIQK

SEQ ID NO: 4831 - protein, 9 aa, synthetic construct
KSNFEFSKD

SEQ ID NO: 4832 - protein, 10 aa, synthetic construct
LAAATRPQAS

SEQ ID NO: 4833 - protein, 11 aa, synthetic construct
LLLERPGAPAT

SEQ ID NO: 4834 - protein, 11 aa, synthetic construct
LNEEASEEILK

SEQ ID NO: 4835 - protein, 10 aa, synthetic construct
LPAPDACQTF

SEQ ID NO: 4836 - protein, 9 aa, synthetic construct
LPAPSPSLP

SEQ ID NO: 4837 - protein, 9 aa, synthetic construct
LPGAPDHPF

SEQ ID NO: 4838 - protein, 9 aa, synthetic construct
LPSSQREVL

SEQ ID NO: 4839 - protein, 11 aa, synthetic construct
LSGKMQPLLLL

SEQ ID NO: 4840 - protein, 9 aa, synthetic construct
LSSGPILEL

SEQ ID NO: 4841 - protein, 9 aa, synthetic construct
LTPQADTGL

SEQ ID NO: 4842 - protein, 10 aa, synthetic construct
LVGPGGGVAL

SEQ ID NO: 4843 - protein, 8 aa, synthetic construct
LVKPTQTL

SEQ ID NO: 4844 - protein, 11 aa, synthetic construct
MEFYSRGFLEA

SEQ ID NO: 4845 - protein, 9 aa, synthetic construct
MEYSGAISA

SEQ ID NO: 4846 - protein, 8 aa, synthetic construct
MPFVHVVY

SEQ ID NO: 4847 - protein, 9 aa, synthetic construct
MPGRLICTY

SEQ ID NO: 4848 - protein, 8 aa, synthetic construct
MQLNSAWI

SEQ ID NO: 4849 - protein, 10 aa, synthetic construct
MTMSTILSKK

SEQ ID NO: 4850 - protein, 9 aa, synthetic construct
NPRPGLGAL

SEQ ID NO: 4851 - protein, 9 aa, synthetic construct
NTLLHSLLV

SEQ ID NO: 4852 - protein, 11 aa, synthetic construct
PGPCLAPYDLW

SEQ ID NO: 4853 - protein, 11 aa, synthetic construct
PIPGKATLLLY

SEQ ID NO: 4854 - protein, 9 aa, synthetic construct
PISSRATLI

SEQ ID NO: 4855 - protein, 9 aa, synthetic construct
PLRVLLLSL

SEQ ID NO: 4856 - protein, 10 aa, synthetic construct
PPHTSLPILL

SEQ ID NO: 4857 - protein, 11 aa, synthetic construct
QPRAQGAVGVL

SEQ ID NO: 4858 - protein, 9 aa, synthetic construct
QSPVALRPL

SEQ ID NO: 4859 - protein, 8 aa, synthetic construct
QTVFLSLL

SEQ ID NO: 4860 - protein, 10 aa, synthetic construct
REAEFAFLSP

SEQ ID NO: 4861 - protein, 11 aa, synthetic construct
REHTFSFENSA

SEQ ID NO: 4862 - protein, 11 aa, synthetic construct
RLLASASAGPQ

SEQ ID NO: 4863 - protein, 10 aa, synthetic construct
RPWLSSPTGL

SEQ ID NO: 4864 - protein, 10 aa, synthetic construct
RRFLGVLEPR

SEQ ID NO: 4865 - protein, 10 aa, synthetic construct
RRVEIAFPAR

SEQ ID NO: 4866 - protein, 8 aa, synthetic construct
OLMALINC

SEQ ID NO: 4867 - protein, 9 aa, synthetic construct
RTGFLPLII

SEQ ID NO: 4868 - protein, 9 aa, synthetic construct
SEMGFPHAA

SEQ ID NO: 4869 - protein, 9 aa, synthetic construct
SEVELLVTP

SEQ ID NO: 4870 - protein, 10 aa, synthetic construct
SGDPGGALSY

SEQ ID NO: 4871 - protein, 9 aa, synthetic construct
SGPLSTVAL

SEQ ID NO: 4872 - protein, 10 aa, synthetic construct
SLLSLVTGLK

SEQ ID NO: 4873 - protein, 9 aa, synthetic construct
SLYQTIRLK

SEQ ID NO: 4874 - protein, 10 aa, synthetic construct
SPRKNNFFHL

SEQ ID NO: 4875 - protein, 9 aa, synthetic construct
SPSRPPSSL

SEQ ID NO: 4876 - protein, 8 aa, synthetic construct
SPVALRPL

SEQ ID NO: 4877 - protein, 9 aa, synthetic construct
SRVNGAWQY

SEQ ID NO: 4878 - protein, 9 aa, synthetic construct
SSILLNVKP

SEQ ID NO: 4879 - protein, 11 aa, synthetic construct
SVAPALALFPA

SEQ ID NO: 4880 - protein, 9 aa, synthetic construct
SVASISLTK

SEQ ID NO: 4881 - protein, 10 aa, synthetic construct
TDVGLGLLSS

SEQ ID NO: 4882 - protein, 9 aa, synthetic construct
TPAPRPAVL

SEQ ID NO: 4883 - protein, 9 aa, synthetic construct
TPVAVITDM

SEQ ID NO: 4884 - protein, 9 aa, synthetic construct
TTCGIFTGF

SEQ ID NO: 4885 - protein, 9 aa, synthetic construct
TVLGWKTPK

SEQ ID NO: 4886 - protein, 9 aa, synthetic construct
TVLQRPATL

SEQ ID NO: 4887 - protein, 9 aa, synthetic construct
TVPENPTAL

SEQ ID NO: 4888 - protein, 9 aa, synthetic construct
TVSGVSLTF

SEQ ID NO: 4889 - protein, 11 aa, synthetic construct
TVVAVPAAAAA

SEQ ID NO: 4890 - protein, 9 aa, synthetic construct
VEIQQFRLA

SEQ ID NO: 4891 - protein, 8 aa, synthetic construct
VFEFLNAK

SEQ ID NO: 4892 - protein, 8 aa, synthetic construct
VLCITDPF

SEQ ID NO: 4893 - protein, 10 aa, synthetic construct
VLPERNVPSL

SEQ ID NO: 4894 - protein, 9 aa, synthetic construct
VPLSVEHRI

SEQ ID NO: 4895 - protein, 9 aa, synthetic construct
VPSDRLALL

SEQ ID NO: 4896 - protein, 10 aa, synthetic construct
VQYAIKNIFK

SEQ ID NO: 4897 - protein, 8 aa, synthetic construct
VTLTTNHV

SEQ ID NO: 4898 - protein, 8 aa, synthetic construct
VWSSGRSW

SEQ ID NO: 4899 - protein, 8 aa, synthetic construct
WDSLSIYK

SEQ ID NO: 4900 - protein, 11 aa, synthetic construct
WRFQSCPPTTY

SEQ ID NO: 4901 - protein, 9 aa, synthetic construct
YLSTPFLSK

SEQ ID NO: 4902 - protein, 9 aa, synthetic construct
AENTLSKLL

SEQ ID NO: 4903 - protein, 9 aa, synthetic construct
AIIESTPEL

SEQ ID NO: 4904 - protein, 9 aa, synthetic construct
AYAIIKEEL

SEQ ID NO: 4905 - protein, 9 aa, synthetic construct
DPFPAAIIL

SEQ ID NO: 4906 - protein, 9 aa, synthetic construct
DYPRYLFEI

SEQ ID NO: 4907 - protein, 10 aa, synthetic construct
EVHNLNQLLY

SEQ ID NO: 4908 - protein, 10 aa, synthetic construct
FIDENVATHS

SEQ ID NO: 4909 - protein, 9 aa, synthetic construct
FPTHYEEAL

SEQ ID NO: 4910 - protein, 9 aa, synthetic construct
GPDTKRVCL

SEQ ID NO: 4911 - protein, 9 aa, synthetic construct
GQAWVGFVV

SEQ ID NO: 4912 - protein, 11 aa, synthetic construct
ILASNNDVKKL

SEQ ID NO: 4913 - protein, 9 aa, synthetic construct
IRKERPISL

SEQ ID NO: 4914 - protein, 8 aa, synthetic construct
LPYAVVTV

SEQ ID NO: 4915 - protein, 9 aa, synthetic construct
LTRQKELLL

SEQ ID NO: 4916 - protein, 9 aa, synthetic construct
MPFATPMEA

SEQ ID NO: 4917 - protein, 11 aa, synthetic construct
MPFATPMEAEL

SEQ ID NO: 4918 - protein, 9 aa, synthetic construct
NMLEAVHTI

SEQ ID NO: 4919 - protein, 11 aa, synthetic construct
RYSGVNQSMLF

SEQ ID NO: 4920 - protein, 9 aa, synthetic construct
SAFPTTINF

SEQ ID NO: 4921 - protein, 9 aa, synthetic construct
SAYGEPRKL

SEQ ID NO: 4922 - protein, 9 aa, synthetic construct
SLQEYIVSA

SEQ ID NO: 4923 - protein, 9 aa, synthetic construct
SPNSILKAA

SEQ ID NO: 4924 - protein, 10 aa, synthetic construct
TLPTFDPTKV

SEQ ID NO: 4925 - protein, 8 aa, synthetic construct
VEAFQQEL

SEQ ID NO: 4926 - protein, 11 aa, synthetic construct
VPWMPPGKSSA

SEQ ID NO: 4927 - protein, 9 aa, synthetic construct
AAAEIYEEF

SEQ ID NO: 4928 - protein, 10 aa, synthetic construct
AAALCNACEL

SEQ ID NO: 4929 - protein, 9 aa, synthetic construct
AAATYILEA

SEQ ID NO: 4930 - protein, 11 aa, synthetic construct
AAEDDEDDDVD

SEQ ID NO: 4931 - protein, 9 aa, synthetic construct
AAFAYTVKY

SEQ ID NO: 4932 - protein, 9 aa, synthetic construct
AAFDGGFTV

SEQ ID NO: 4933 - protein, 9 aa, synthetic construct
AAFEGTVFF

SEQ ID NO: 4934 - protein, 8 aa, synthetic construct
AAFEKQVL

SEQ ID NO: 4935 - protein, 9 aa, synthetic construct
AAFGGTFKK

SEQ ID NO: 4936 - protein, 8 aa, synthetic construct
AAFGQLHK

SEQ ID NO: 4937 - protein, 11 aa, synthetic construct
AAGPPISEGKY

SEQ ID NO: 4938 - protein, 9 aa, synthetic construct
AAGPTGMFF

SEQ ID NO: 4939 - protein, 9 aa, synthetic construct
AAGPVGPAL

SEQ ID NO: 4940 - protein, 9 aa, synthetic construct
AAIAAVNAL

SEQ ID NO: 4941 - protein, 11 aa, synthetic construct
AAIEWDGKIYK

SEQ ID NO: 4942 - protein, 9 aa, synthetic construct
AAIGLVIYY

SEQ ID NO: 4943 - protein, 10 aa, synthetic construct
AAIVAYGLYK

SEQ ID NO: 4944 - protein, 9 aa, synthetic construct
AALDSFYLK

SEQ ID NO: 4945 - protein, 9 aa, synthetic construct
AALDWVTKK

SEQ ID NO: 4946 - protein, 9 aa, synthetic construct
AALKKALAA

SEQ ID NO: 4947 - protein, 9 aa, synthetic construct
AALPNVYEV

SEQ ID NO: 4948 - protein, 8 aa, synthetic construct
AALRPLVK

SEQ ID NO: 4949 - protein, 9 aa, synthetic construct
AALTFPVLF

SEQ ID NO: 4950 - protein, 10 aa, synthetic construct
AAMLDTVVFK

SEQ ID NO: 4951 - protein, 9 aa, synthetic construct
AAPALASSL

SEQ ID NO: 4952 - protein, 8 aa, synthetic construct
AAPAPAEP

SEQ ID NO: 4953 - protein, 9 aa, synthetic construct
AAPESGLEV

SEQ ID NO: 4954 - protein, 8 aa, synthetic construct
AAPFTSKL

SEQ ID NO: 4955 - protein, 9 aa, synthetic construct
AAPGVDLTQ

SEQ ID NO: 4956 - protein, 9 aa, synthetic construct
AAPIAITCF

SEQ ID NO: 4957 - protein, 8 aa, synthetic construct
AAPLGTTL

SEQ ID NO: 4958 - protein, 9 aa, synthetic construct
AAPPAAPAL

SEQ ID NO: 4959 - protein, 9 aa, synthetic construct
AAPQESVTF

SEQ ID NO: 4960 - protein, 9 aa, synthetic construct
AARAVTGVL

SEQ ID NO: 4961 - protein, 9 aa, synthetic construct
AARPATSTL

SEQ ID NO: 4962 - protein, 11 aa, synthetic construct
AASKERSGVSL

SEQ ID NO: 4963 - protein, 9 aa, synthetic construct
AASPVVAEY

SEQ ID NO: 4964 - protein, 11 aa, synthetic construct
AATAPALPQPP

SEQ ID NO: 4965 - protein, 9 aa, synthetic construct
AAVGIYEQY

SEQ ID NO: 4966 - protein, 9 aa, synthetic construct
AAVPRAAFL

SEQ ID NO: 4967 - protein, 9 aa, synthetic construct
AAMAGRLMI

SEQ ID NO: 4968 - protein, 9 aa, synthetic construct
AAMASLGAL

SEQ ID NO: 4969 - protein, 9 aa, synthetic construct
AAMLDTVVF

SEQ ID NO: 4970 - protein, 9 aa, synthetic construct
AAMPLALLV

SEQ ID NO: 4971 - protein, 9 aa, synthetic construct
AAMPRPVSY

SEQ ID NO: 4972 - protein, 9 aa, synthetic construct
ACGPPQLTV

SEQ ID NO: 4973 - protein, 9 aa, synthetic construct
ACYYPRVEY

SEQ ID NO: 4974 - protein, 9 aa, synthetic construct
ADASLLKKV

SEQ ID NO: 4975 - protein, 8 aa, synthetic construct
ADFGVLHR

SEQ ID NO: 4976 - protein, 11 aa, synthetic construct
ADGQVAELLLR

SEQ ID NO: 4977 - protein, 8 aa, synthetic construct
ADKVHLMY

SEQ ID NO: 4978 - protein, 10 aa, synthetic construct
ADLEMQIESL

SEQ ID NO: 4979 - protein, 9 aa, synthetic construct
ADLVFPSSA

SEQ ID NO: 4980 - protein, 11 aa, synthetic construct
ADSELQLVEQR

SEQ ID NO: 4981 - protein, 10 aa, synthetic construct
ADMALHYANK

SEQ ID NO: 4982 - protein, 8 aa, synthetic construct
ADMGHLKY

SEQ ID NO: 4983 - protein, 9 aa, synthetic construct
AEAAFGLGA

SEQ ID NO: 4984 - protein, 9 aa, synthetic construct
AEAAVVAVA

SEQ ID NO: 4985 - protein, 11 aa, synthetic construct
AEADIISTVEF

SEQ ID NO: 4986 - protein, 9 aa, synthetic construct
AEADVDIIL

SEQ ID NO: 4987 - protein, 10 aa, synthetic construct
AEAEAFLKKA

SEQ ID NO: 4988 - protein, 9 aa, synthetic construct
AEAEFYRQV

SEQ ID NO: 4989 - protein, 11 aa, synthetic construct
AEAEFYRQVSA

SEQ ID NO: 4990 - protein, 9 aa, synthetic construct
AEAGPLASV

SEQ ID NO: 4991 - protein, 9 aa, synthetic construct
AEAKEKIYL

SEQ ID NO: 4992 - protein, 9 aa, synthetic construct
AEALAFSDC

SEQ ID NO: 4993 - protein, 9 aa, synthetic construct
AEALTFEGA

SEQ ID NO: 4994 - protein, 9 aa, synthetic construct
AEANAFSVL

SEQ ID NO: 4995 - protein, 9 aa, synthetic construct
AEAPPPSVV

SEQ ID NO: 4996 - protein, 10 aa, synthetic construct
AEAPVLFAKA

SEQ ID NO: 4997 - protein, 9 aa, synthetic construct
AEAQLWWAA

SEQ ID NO: 4998 - protein, 9 aa, synthetic construct
AEAVFASEV

SEQ ID NO: 4999 - protein, 9 aa, synthetic construct
AEAVNFCTA

SEQ ID NO: 5000 - protein, 9 aa, synthetic construct
AEDLNLLIA

SEQ ID NO: 5001 - protein, 9 aa, synthetic construct
AEDPLVQSL

SEQ ID NO: 5002 - protein, 11 aa, synthetic construct
AEDVLSGKVSA

SEQ ID NO: 5003 - protein, 9 aa, synthetic construct
AEFCLFDRV

SEQ ID NO: 5004 - protein, 9 aa, synthetic construct
AEFDMSAIP

SEQ ID NO: 5005 - protein, 9 aa, synthetic construct
AEFDSFVLV

SEQ ID NO: 5006 - protein, 10 aa, synthetic construct
AEFDSFVLVT

SEQ ID NO: 5007 - protein, 9 aa, synthetic construct
AEFEEFAGL

SEQ ID NO: 5008 - protein, 9 aa, synthetic construct
AEFEWENKV

SEQ ID NO: 5009 - protein, 9 aa, synthetic construct
AEFFLSQQA

SEQ ID NO: 5010 - protein, 9 aa, synthetic construct
AEFHTELER

SEQ ID NO: 5011 - protein, 9 aa, synthetic construct
AEFIKFTVI

SEQ ID NO: 5012 - protein, 9 aa, synthetic construct
AEFKEAFQL

SEQ ID NO: 5013 - protein, 9 aa, synthetic construct
AEFLQKLLP

SEQ ID NO: 5014 - protein, 9 aa, synthetic construct
AEFNLVNNA

SEQ ID NO: 5015 - protein, 9 aa, synthetic construct
AEFNPFSET

SEQ ID NO: 5016 - protein, 10 aa, synthetic construct
AEFNSTPAVF

SEQ ID NO: 5017 - protein, 10 aa, synthetic construct
AEFQAEFVST

SEQ ID NO: 5018 - protein, 9 aa, synthetic construct
AEFQHFLRG

SEQ ID NO: 5019 - protein, 9 aa, synthetic construct
AEFQVKITA

SEQ ID NO: 5020 - protein, 9 aa, synthetic construct
AEFYRQVSA

SEQ ID NO: 5021 - protein, 10 aa, synthetic construct
AEGDVAALNR

SEQ ID NO: 5022 - protein, 10 aa, synthetic construct
AEGEINNVQW

SEQ ID NO: 5023 - protein, 9 aa, synthetic construct
AEGPNYLTA

SEQ ID NO: 5024 - protein, 9 aa, synthetic construct
AEGPPAMLP

SEQ ID NO: 5025 - protein, 9 aa, synthetic construct
AEGPVAVVV

SEQ ID NO: 5026 - protein, 9 aa, synthetic construct
AEGQRWLSA

SEQ ID NO: 5027 - protein, 10 aa, synthetic construct
AEHDRIARQW

SEQ ID NO: 5028 - protein, 9 aa, synthetic construct
AEHFSIIRA

SEQ ID NO: 5029 - protein, 9 aa, synthetic construct
AEHFSMIRA

SEQ ID NO: 5030 - protein, 9 aa, synthetic construct
AEHKEFITA

SEQ ID NO: 5031 - protein, 10 aa, synthetic construct
AEHPTIKIFW

SEQ ID NO: 5032 - protein, 9 aa, synthetic construct
AEIAQLMSL

SEQ ID NO: 5033 - protein, 10 aa, synthetic construct
AEIAQPLLQA

SEQ ID NO: 5034 - protein, 10 aa, synthetic construct
AEIDAHLVAL

SEQ ID NO: 5035 - protein, 11 aa, synthetic construct
AEILELAGNAA

SEQ ID NO: 5036 - protein, 10 aa, synthetic construct
AEINQKLPVA

SEQ ID NO: 5037 - protein, 9 aa, synthetic construct
AEIRHVLVT

SEQ ID NO: 5038 - protein, 10 aa, synthetic construct
AEIRHVLVTL

SEQ ID NO: 5039 - protein, 11 aa, synthetic construct
AEISQIHQSVT

SEQ ID NO: 5040 - protein, 9 aa, synthetic construct
AEKKFIDIA

SEQ ID NO: 5041 - protein, 10 aa, synthetic construct
AELADVLTEA

SEQ ID NO: 5042 - protein, 11 aa, synthetic construct
AELDSVFSSAA

SEQ ID NO: 5043 - protein, 9 aa, synthetic construct
AELEFAIQP

SEQ ID NO: 5044 - protein, 10 aa, synthetic construct
AELEKQLSQA

SEQ ID NO: 5045 - protein, 9 aa, synthetic construct
AELGEAPVP

SEQ ID NO: 5046 - protein, 9 aa, synthetic construct
AELLIFSVP

SEQ ID NO: 5047 - protein, 10 aa, synthetic construct
AELNAQIITA

SEQ ID NO: 5048 - protein, 9 aa, synthetic construct
AELPIIVVL

SEQ ID NO: 5049 - protein, 9 aa, synthetic construct
AELRQAFLA

SEQ ID NO: 5050 - protein, 9 aa, synthetic construct
AELTPHQTF

SEQ ID NO: 5051 - protein, 10 aa, synthetic construct
AEMLYGLIHA

SEQ ID NO: 5052 - protein, 11 aa, synthetic construct
AENEFVTIKKD

SEQ ID NO: 5053 - protein, 9 aa, synthetic construct
AENEGLLVA

SEQ ID NO: 5054 - protein, 9 aa, synthetic construct
AENNIDLVL

SEQ ID NO: 5055 - protein, 10 aa, synthetic construct
AENYLGHTAK

SEQ ID NO: 5056 - protein, 9 aa, synthetic construct
AEPFIDSKY

SEQ ID NO: 5057 - protein, 10 aa, synthetic construct
AEPYMIFKEA

SEQ ID NO: 5058 - protein, 10 aa, synthetic construct
AEREAFELLP

SEQ ID NO: 5059 - protein, 9 aa, synthetic construct
AEREKMLLA

SEQ ID NO: 5060 - protein, 9 aa, synthetic construct
AESAINMLP

SEQ ID NO: 5061 - protein, 9 aa, synthetic construct
AESIVVHTY

SEQ ID NO: 5062 - protein, 9 aa, synthetic construct
AETPDIKLF

SEQ ID NO: 5063 - protein, 9 aa, synthetic construct
AETQFRQLV

SEQ ID NO: 5064 - protein, 9 aa, synthetic construct
AEVDAAMAA

SEQ ID NO: 5065 - protein, 9 aa, synthetic construct
AEVFPPPVA

SEQ ID NO: 5066 - protein, 9 aa, synthetic construct
AEVILQGTA

SEQ ID NO: 5067 - protein, 10 aa, synthetic construct
AEVLVTGEQL

SEQ ID NO: 5068 - protein, 11 aa, synthetic construct
AEVNADRITWL

SEQ ID NO: 5069 - protein, 11 aa, synthetic construct
AEVQVLVLDGR

SEQ ID NO: 5070 - protein, 8 aa, synthetic construct
AEVYHNLK

SEQ ID NO: 5071 - protein, 9 aa, synthetic construct
AEWLGVLKA

SEQ ID NO: 5072 - protein, 9 aa, synthetic construct
AEWVIKSKP

SEQ ID NO: 5073 - protein, 11 aa, synthetic construct
AEYAGRLGVGA

SEQ ID NO: 5074 - protein, 10 aa, synthetic construct
AEYDFRNDSV

SEQ ID NO: 5075 - protein, 10 aa, synthetic construct
AEYDNFFQHL

SEQ ID NO: 5076 - protein, 10 aa, synthetic construct
AEYDQRQLQA

SEQ ID NO: 5077 - protein, 8 aa, synthetic construct
AEYEFISS

SEQ ID NO: 5078 - protein, 9 aa, synthetic construct
AEYEFLSFV

SEQ ID NO: 5079 - protein, 9 aa, synthetic construct
AEYGHFVDI

SEQ ID NO: 5080 - protein, 9 aa, synthetic construct
AEYHQSILA

SEQ ID NO: 5081 - protein, 10 aa, synthetic construct
AEYIPLTPAA

SEQ ID NO: 5082 - protein, 11 aa, synthetic construct
AEYIPLTPAAA

SEQ ID NO: 5083 - protein, 9 aa, synthetic construct
AEYLYFFRV

SEQ ID NO: 5084 - protein, 10 aa, synthetic construct
AEYSRFVNQI

SEQ ID NO: 5085 - protein, 9 aa, synthetic construct
AEYVGHLRA

SEQ ID NO: 5086 - protein, 9 aa, synthetic construct
AEYVSAREW

SEQ ID NO: 5087 - protein, 10 aa, synthetic construct
AEMNGKLIAA

SEQ ID NO: 5088 - protein, 11 aa, synthetic construct
AFAILDGGAPG

SEQ ID NO: 5089 - protein, 9 aa, synthetic construct
AFDEAIAEL

SEQ ID NO: 5090 - protein, 9 aa, synthetic construct
AFDISKKEM

SEQ ID NO: 5091 - protein, 9 aa, synthetic construct
AFDLDVVKL

SEQ ID NO: 5092 - protein, 9 aa, synthetic construct
AFDLTEQRY

SEQ ID NO: 5093 - protein, 9 aa, synthetic construct
AFDNMVTSM

SEQ ID NO: 5094 - protein, 9 aa, synthetic construct
AFEDVAVNF

SEQ ID NO: 5095 - protein, 9 aa, synthetic construct
AFIEYEHER

SEQ ID NO: 5096 - protein, 9 aa, synthetic construct
AFIKIKMAF

SEQ ID NO: 5097 - protein, 10 aa, synthetic construct
AFPMPGFDEH

SEQ ID NO: 5098 - protein, 9 aa, synthetic construct
AGDPATLEY

SEQ ID NO: 5099 - protein, 8 aa, synthetic construct
AGDVHIVR

SEQ ID NO: 5100 - protein, 8 aa, synthetic construct
AGEDPGLA

SEQ ID NO: 5101 - protein, 9 aa, synthetic construct
AGEKEAKSD

SEQ ID NO: 5102 - protein, 8 aa, synthetic construct
AGELTPEE

SEQ ID NO: 5103 - protein, 10 aa, synthetic construct
AGELTPEEEA

SEQ ID NO: 5104 - protein, 8 aa, synthetic construct
AGFLLATI

SEQ ID NO: 5105 - protein, 9 aa, synthetic construct
AGFQRVQAL

SEQ ID NO: 5106 - protein, 11 aa, synthetic construct
AGGGVIPHIHK

SEQ ID NO: 5107 - protein, 8 aa, synthetic construct
AGKEGTEN

SEQ ID NO: 5108 - protein, 9 aa, synthetic construct
AGPGPGAVL

SEQ ID NO: 5109 - protein, 10 aa, synthetic construct
AGPHFNPLSR

SEQ ID NO: 5110 - protein, 9 aa, synthetic construct
AGPMRQISL

SEQ ID NO: 5111 - protein, 9 aa, synthetic construct
AGPPDTISL

SEQ ID NO: 5112 - protein, 11 aa, synthetic construct
AGPPISEGKYF

SEQ ID NO: 5113 - protein, 11 aa, synthetic construct
AGQAFRKFLPL

SEQ ID NO: 5114 - protein, 9 aa, synthetic construct
AGYVTHLMK

SEQ ID NO: 5115 - protein, 9 aa, synthetic construct
AGMALGIQK

SEQ ID NO: 5116 - protein, 8 aa, synthetic construct
AHLGVQVK

SEQ ID NO: 5117 - protein, 10 aa, synthetic construct
AHVDDMPNAL

SEQ ID NO: 5118 - protein, 9 aa, synthetic construct
AIAPIIAAV

SEQ ID NO: 5119 - protein, 9 aa, synthetic construct
AIARLKEVL

SEQ ID NO: 5120 - protein, 9 aa, synthetic construct
AIDAALTSV

SEQ ID NO: 5121 - protein, 9 aa, synthetic construct
AIDEDVLRY

SEQ ID NO: 5122 - protein, 8 aa, synthetic construct
AIFLADGN

SEQ ID NO: 5123 - protein, 11 aa, synthetic construct
AIFSLSSALSS

SEQ ID NO: 5124 - protein, 8 aa, synthetic construct
AIGPCRML

SEQ ID NO: 5125 - protein, 9 aa, synthetic construct
AIIGGMFTV

SEQ ID NO: 5126 - protein, 11 aa, synthetic construct
AINMVTEEDKR

SEQ ID NO: 5127 - protein, 10 aa, synthetic construct
AIQIQNTQVN

SEQ ID NO: 5128 - protein, 11 aa, synthetic construct
AIQKITLKKPL

SEQ ID NO: 5129 - protein, 9 aa, synthetic construct
AIRNAMGSL

SEQ ID NO: 5130 - protein, 9 aa, synthetic construct
AIYEPKTFK

SEQ ID NO: 5131 - protein, 11 aa, synthetic construct
AKKPAGAAKKP

SEQ ID NO: 5132 - protein, 8 aa, synthetic construct
AKTDQAQK

SEQ ID NO: 5133 - protein, 9 aa, synthetic construct
ALADGVQKV

SEQ ID NO: 5134 - protein, 10 aa, synthetic construct
ALADGVVSQA

SEQ ID NO: 5135 - protein, 9 aa, synthetic construct
ALAGVSFEI

SEQ ID NO: 5136 - protein, 9 aa, synthetic construct
ALAIKVLNK

SEQ ID NO: 5137 - protein, 9 aa, synthetic construct
ALAPGLPTA

SEQ ID NO: 5138 - protein, 9 aa, synthetic construct
ALDDMISTL

SEQ ID NO: 5139 - protein, 9 aa, synthetic construct
ALDEVFTKV

SEQ ID NO: 5140 - protein, 9 aa, synthetic construct
ALDGFLFVV

SEQ ID NO: 5141 - protein, 9 aa, synthetic construct
ALDKATVLL

SEQ ID NO: 5142 - protein, 9 aa, synthetic construct
ALDPASISV

SEQ ID NO: 5143 - protein, 9 aa, synthetic construct
ALDPNIATL

SEQ ID NO: 5144 - protein, 9 aa, synthetic construct
ALDTALYAA

SEQ ID NO: 5145 - protein, 10 aa, synthetic construct
ALEEQLQQIR

SEQ ID NO: 5146 - protein, 10 aa, synthetic construct
ALEVTVHQKD

SEQ ID NO: 5147 - protein, 9 aa, synthetic construct
ALFDAQAQV

SEQ ID NO: 5148 - protein, 9 aa, synthetic construct
ALFEGKVQL

SEQ ID NO: 5149 - protein, 9 aa, synthetic construct
ALFGIPMAL

SEQ ID NO: 5150 - protein, 8 aa, synthetic construct
ALFKAWAL

SEQ ID NO: 5151 - protein, 9 aa, synthetic construct
ALFLTLTTK

SEQ ID NO: 5152 - protein, 11 aa, synthetic construct
ALFSSSMRNVQ

SEQ ID NO: 5153 - protein, 8 aa, synthetic construct
ALGTVTNV

SEQ ID NO: 5154 - protein, 9 aa, synthetic construct
ALHERIQAL

SEQ ID NO: 5155 - protein, 9 aa, synthetic construct
ALHHRILAL

SEQ ID NO: 5156 - protein, 10 aa, synthetic construct
ALIDEQILCV

SEQ ID NO: 5157 - protein, 9 aa, synthetic construct
ALIEKLVEL

SEQ ID NO: 5158 - protein, 9 aa, synthetic construct
ALIHDGLAR

SEQ ID NO: 5159 - protein, 9 aa, synthetic construct
ALIPETTTL

SEQ ID NO: 5160 - protein, 9 aa, synthetic construct
ALISRKEAL

SEQ ID NO: 5161 - protein, 9 aa, synthetic construct
ALKAKKAVL

SEQ ID NO: 5162 - protein, 9 aa, synthetic construct
ALKARTVTF

SEQ ID NO: 5163 - protein, 11 aa, synthetic construct
ALKLARQIALA

SEQ ID NO: 5164 - protein, 9 aa, synthetic construct
ALKLKQKSL

SEQ ID NO: 5165 - protein, 8 aa, synthetic construct
ALKLKQSL

SEQ ID NO: 5166 - protein, 9 aa, synthetic construct
ALLAYTLGV

SEQ ID NO: 5167 - protein, 11 aa, synthetic construct
ALLDGSNVVFK

SEQ ID NO: 5168 - protein, 10 aa, synthetic construct
ALLEDSCHYL

SEQ ID NO: 5169 - protein, 9 aa, synthetic construct
ALLGKIEKV

SEQ ID NO: 5170 - protein, 9 aa, synthetic construct
ALLGSAFQL

SEQ ID NO: 5171 - protein, 8 aa, synthetic construct
ALLLEDGG

SEQ ID NO: 5172 - protein, 9 aa, synthetic construct
ALLPIFFGA

SEQ ID NO: 5173 - protein, 9 aa, synthetic construct
ALLPSSPTL

SEQ ID NO: 5174 - protein, 9 aa, synthetic construct
ALLPYFVYV

SEQ ID NO: 5175 - protein, 9 aa, synthetic construct
ALLQRLEAL

SEQ ID NO: 5176 - protein, 9 aa, synthetic construct
ALLQRQHAL

SEQ ID NO: 5177 - protein, 9 aa, synthetic construct
ALLSAAFLL

SEQ ID NO: 5178 - protein, 9 aa, synthetic construct
ALLSRLEQI

SEQ ID NO: 5179 - protein, 9 aa, synthetic construct
ALNAHTFLR

SEQ ID NO: 5180 - protein, 9 aa, synthetic construct
ALNALILAY

SEQ ID NO: 5181 - protein, 9 aa, synthetic construct
ALNEKLVNL

SEQ ID NO: 5182 - protein, 9 aa, synthetic construct
ALNELLQHV

SEQ ID NO: 5183 - protein, 9 aa, synthetic construct
ALPDSMVSV

SEQ ID NO: 5184 - protein, 9 aa, synthetic construct
ALPEAIAAL

SEQ ID NO: 5185 - protein, 9 aa, synthetic construct
ALPEIFTEL

SEQ ID NO: 5186 - protein, 9 aa, synthetic construct
ALPEVSVEA

SEQ ID NO: 5187 - protein, 8 aa, synthetic construct
ALPHAILR

SEQ ID NO: 5188 - protein, 11 aa, synthetic construct
ALPLDTVTFYK

SEQ ID NO: 5189 - protein, 9 aa, synthetic construct
ALPPKPRFL

SEQ ID NO: 5190 - protein, 9 aa, synthetic construct
ALPPVLTTV

SEQ ID NO: 5191 - protein, 9 aa, synthetic construct
ALQEASEAY

SEQ ID NO: 5192 - protein, 9 aa, synthetic construct
ALSDYDLVL

SEQ ID NO: 5193 - protein, 9 aa, synthetic construct
ALSEFVEGL

SEQ ID NO: 5194 - protein, 9 aa, synthetic construct
ALSELATAV

SEQ ID NO: 5195 - protein, 9 aa, synthetic construct
ALSEMVEYI

SEQ ID NO: 5196 - protein, 9 aa, synthetic construct
ALSGTLSGV

SEQ ID NO: 5197 - protein, 9 aa, synthetic construct
ALSNLEVKL

SEQ ID NO: 5198 - protein, 9 aa, synthetic construct
ALSNLEVTL

SEQ ID NO: 5199 - protein, 9 aa, synthetic construct
ALSSFDSKL

SEQ ID NO: 5200 - protein, 9 aa, synthetic construct
ALTDVILCV

SEQ ID NO: 5201 - protein, 9 aa, synthetic construct
ALTELLAKI

SEQ ID NO: 5202 - protein, 9 aa, synthetic construct
ALTPVVVTL

SEQ ID NO: 5203 - protein, 9 aa, synthetic construct
ALVDQLWKL

SEQ ID NO: 5204 - protein, 11 aa, synthetic construct
ALVKKLKKKKG

SEQ ID NO: 5205 - protein, 9 aa, synthetic construct
ALVQDLAKA

SEQ ID NO: 5206 - protein, 9 aa, synthetic construct
ALWDKLFNL

SEQ ID NO: 5207 - protein, 9 aa, synthetic construct
ALWGRTTLK

SEQ ID NO: 5208 - protein, 9 aa, synthetic construct
ALWNEEALL

SEQ ID NO: 5209 - protein, 9 aa, synthetic construct
ALYDATYET

SEQ ID NO: 5210 - protein, 9 aa, synthetic construct
ALYDEVRTV

SEQ ID NO: 5211 - protein, 9 aa, synthetic construct
ALYDNVEKL

SEQ ID NO: 5212 - protein, 9 aa, synthetic construct
ALYEQSLHI

SEQ ID NO: 5213 - protein, 10 aa, synthetic construct
ALYETPTGWK

SEQ ID NO: 5214 - protein, 9 aa, synthetic construct
ALYGQPLLL

SEQ ID NO: 5215 - protein, 9 aa, synthetic construct
ALYGRALRV

SEQ ID NO: 5216 - protein, 9 aa, synthetic construct
ALYGRFTIK

SEQ ID NO: 5217 - protein, 9 aa, synthetic construct
ALYPHVLVK

SEQ ID NO: 5218 - protein, 9 aa, synthetic construct
ALYPNVVQV

SEQ ID NO: 5219 - protein, 9 aa, synthetic construct
ALYSELLAV

SEQ ID NO: 5220 - protein, 9 aa, synthetic construct
ALMADMVYV

SEQ ID NO: 5221 - protein, 9 aa, synthetic construct
ALMDEILML

SEQ ID NO: 5222 - protein, 9 aa, synthetic construct
ALMDLLLRL

SEQ ID NO: 5223 - protein, 9 aa, synthetic construct
ALMKEIPAL

SEQ ID NO: 5224 - protein, 9 aa, synthetic construct
ALMPTLEAL

SEQ ID NO: 5225 - protein, 9 aa, synthetic construct
ALMPVLNQV

SEQ ID NO: 5226 - protein, 11 aa, synthetic construct
AMATRTRQQYL

SEQ ID NO: 5227 - protein, 9 aa, synthetic construct
AMPFKCMQL

SEQ ID NO: 5228 - protein, 9 aa, synthetic construct
AMYVQLIEV

SEQ ID NO: 5229 - protein, 9 aa, synthetic construct
ANHFFTVTD

SEQ ID NO: 5230 - protein, 8 aa, synthetic construct
ANKVRVAL

SEQ ID NO: 5231 - protein, 9 aa, synthetic construct
APAAAVPTL

SEQ ID NO: 5232 - protein, 10 aa, synthetic construct
APAAGAGRLL

SEQ ID NO: 5233 - protein, 10 aa, synthetic construct
APAAGLFLLL

SEQ ID NO: 5234 - protein, 9 aa, synthetic construct
APAAGWQSL

SEQ ID NO: 5235 - protein, 10 aa, synthetic construct
APAAPSATAL

SEQ ID NO: 5236 - protein, 11 aa, synthetic construct
APAARFNNSQF

SEQ ID NO: 5237 - protein, 9 aa, synthetic construct
APAAVALVL

SEQ ID NO: 5238 - protein, 9 aa, synthetic construct
APADGFSDL

SEQ ID NO: 5239 - protein, 9 aa, synthetic construct
APADYFRIL

SEQ ID NO: 5240 - protein, 9 aa, synthetic construct
APAEILNGK

SEQ ID NO: 5241 - protein, 9 aa, synthetic construct
APAELKSPF

SEQ ID NO: 5242 - protein, 9 aa, synthetic construct
APAGRKVGL

SEQ ID NO: 5243 - protein, 10 aa, synthetic construct
APAGVFGVAF

SEQ ID NO: 5244 - protein, 9 aa, synthetic construct
APAIHQIVL

SEQ ID NO: 5245 - protein, 9 aa, synthetic construct
APALPGPAL

SEQ ID NO: 5246 - protein, 11 aa, synthetic construct
APAPAPIHNQF

SEQ ID NO: 5247 - protein, 9 aa, synthetic construct
APAPAPLSV

SEQ ID NO: 5248 - protein, 9 aa, synthetic construct
APAPASISL

SEQ ID NO: 5249 - protein, 9 aa, synthetic construct
APAPESITL

SEQ ID NO: 5250 - protein, 10 aa, synthetic construct
APAPEVGRTL

SEQ ID NO: 5251 - protein, 9 aa, synthetic construct
APAPIHNQF

SEQ ID NO: 5252 - protein, 9 aa, synthetic construct
APAPKAYVL

SEQ ID NO: 5253 - protein, 9 aa, synthetic construct
APAPPSSGL

SEQ ID NO: 5254 - protein, 10 aa, synthetic construct
APAPTVRLGL

SEQ ID NO: 5255 - protein, 9 aa, synthetic construct
APARPYQGV

SEQ ID NO: 5256 - protein, 11 aa, synthetic construct
APASAAWRSVL

SEQ ID NO: 5257 - protein, 9 aa, synthetic construct
APAYLPRSL

SEQ ID NO: 5258 - protein, 9 aa, synthetic construct
APCEVTVPA

SEQ ID NO: 5259 - protein, 9 aa, synthetic construct
APCIYSEVM

SEQ ID NO: 5260 - protein, 11 aa, synthetic construct
APDKHHITPLL

SEQ ID NO: 5261 - protein, 9 aa, synthetic construct
APDNIIKFY

SEQ ID NO: 5262 - protein, 9 aa, synthetic construct
APDRGWMAL

SEQ ID NO: 5263 - protein, 9 aa, synthetic construct
APDSQRLKL

SEQ ID NO: 5264 - protein, 10 aa, synthetic construct
APDSQRLKLL

SEQ ID NO: 5265 - protein, 9 aa, synthetic construct
APDVRLRAL

SEQ ID NO: 5266 - protein, 8 aa, synthetic construct
APEEHPVL

SEQ ID NO: 5267 - protein, 11 aa, synthetic construct
APFDKTANITF

SEQ ID NO: 5268 - protein, 9 aa, synthetic construct
APFDWKILY

SEQ ID NO: 5269 - protein, 11 aa, synthetic construct
APFEPLASGIL

SEQ ID NO: 5270 - protein, 10 aa, synthetic construct
APFHQLRISY

SEQ ID NO: 5271 - protein, 10 aa, synthetic construct
APFQGDQRSL

SEQ ID NO: 5272 - protein, 9 aa, synthetic construct
APFSKVLTF

SEQ ID NO: 5273 - protein, 9 aa, synthetic construct
APFTITPVF

SEQ ID NO: 5274 - protein, 10 aa, synthetic construct
APGAPAAVAL

SEQ ID NO: 5275 - protein, 9 aa, synthetic construct
APGEFRAIM

SEQ ID NO: 5276 - protein, 9 aa, synthetic construct
APGEPGSAF

SEQ ID NO: 5277 - protein, 10 aa, synthetic construct
APGIRDHESL

SEQ ID NO: 5278 - protein, 9 aa, synthetic construct
APGIRSWSL

SEQ ID NO: 5279 - protein, 9 aa, synthetic construct
APGKRILVL

SEQ ID NO: 5280 - protein, 10 aa, synthetic construct
APGPPGRSML

SEQ ID NO: 5281 - protein, 9 aa, synthetic construct
APGPRGSYL

SEQ ID NO: 5282 - protein, 8 aa, synthetic construct
APGQGGIL

SEQ ID NO: 5283 - protein, 9 aa, synthetic construct
APGQPGTIL

SEQ ID NO: 5284 - protein, 9 aa, synthetic construct
APGSWSQVL

SEQ ID NO: 5285 - protein, 9 aa, synthetic construct
APGVRAVEL

SEQ ID NO: 5286 - protein, 9 aa, synthetic construct
APGYLPTSL

SEQ ID NO: 5287 - protein, 10 aa, synthetic construct
APHARNGLSL

SEQ ID NO: 5288 - protein, 9 aa, synthetic construct
APHEILIQI

SEQ ID NO: 5289 - protein, 10 aa, synthetic construct
APHEPDGVAL

SEQ ID NO: 5290 - protein, 9 aa, synthetic construct
APHIPVHLG

SEQ ID NO: 5291 - protein, 9 aa, synthetic construct
APHLVGPHL

SEQ ID NO: 5292 - protein, 9 aa, synthetic construct
APHWKRHQL

SEQ ID NO: 5293 - protein, 10 aa, synthetic construct
APIDRVGQTI

SEQ ID NO: 5294 - protein, 8 aa, synthetic construct
APILKRAL

SEQ ID NO: 5295 - protein, 9 aa, synthetic construct
APIPGSPLY

SEQ ID NO: 5296 - protein, 10 aa, synthetic construct
APISAPEYTY

SEQ ID NO: 5297 - protein, 11 aa, synthetic construct
APISEPIEWKY

SEQ ID NO: 5298 - protein, 9 aa, synthetic construct
APISVRVEL

SEQ ID NO: 5299 - protein, 11 aa, synthetic construct
APIYADLSLKY

SEQ ID NO: 5300 - protein, 9 aa, synthetic construct
APKPGGLSL

SEQ ID NO: 5301 - protein, 9 aa, synthetic construct
APKPKWTQL

SEQ ID NO: 5302 - protein, 9 aa, synthetic construct
APKPQGPAF

SEQ ID NO: 5303 - protein, 9 aa, synthetic construct
APKPRKVEL

SEQ ID NO: 5304 - protein, 9 aa, synthetic construct
APKPRLNQL

SEQ ID NO: 5305 - protein, 10 aa, synthetic construct
APKPSSRPSL

SEQ ID NO: 5306 - protein, 9 aa, synthetic construct
APKRPPSAF

SEQ ID NO: 5307 - protein, 10 aa, synthetic construct
APKRPPSAFF

SEQ ID NO: 5308 - protein, 9 aa, synthetic construct
APKSQIVML

SEQ ID NO: 5309 - protein, 9 aa, synthetic construct
APLDLAVAY

SEQ ID NO: 5310 - protein, 9 aa, synthetic construct
APLEDEATL

SEQ ID NO: 5311 - protein, 9 aa, synthetic construct
APLKSKMIY

SEQ ID NO: 5312 - protein, 9 aa, synthetic construct
APLLELTAY

SEQ ID NO: 5313 - protein, 9 aa, synthetic construct
APLLRKVYL

SEQ ID NO: 5314 - protein, 8 aa, synthetic construct
APLLRWVL

SEQ ID NO: 5315 - protein, 9 aa, synthetic construct
APLYHWRTL

SEQ ID NO: 5316 - protein, 9 aa, synthetic construct
APNGAGLVL

SEQ ID NO: 5317 - protein, 8 aa, synthetic construct
APNHVVAK

SEQ ID NO: 5318 - protein, 8 aa, synthetic construct
APNIISQL

SEQ ID NO: 5319 - protein, 11 aa, synthetic construct
APNLGRSFHIL

SEQ ID NO: 5320 - protein, 9 aa, synthetic construct
APNPIHLTV

SEQ ID NO: 5321 - protein, 9 aa, synthetic construct
APNPVVSSL

SEQ ID NO: 5322 - protein, 9 aa, synthetic construct
APNYRLKSL

SEQ ID NO: 5323 - protein, 9 aa, synthetic construct
APPRPGSSF

SEQ ID NO: 5324 - protein, 10 aa, synthetic construct
APPSRLASAL

SEQ ID NO: 5325 - protein, 10 aa, synthetic construct
APPSTSAAAL

SEQ ID NO: 5326 - protein, 9 aa, synthetic construct
APPSTSAAL

SEQ ID NO: 5327 - protein, 9 aa, synthetic construct
APQGGLAEF

SEQ ID NO: 5328 - protein, 9 aa, synthetic construct
APQSFRAEL

SEQ ID NO: 5329 - protein, 9 aa, synthetic construct
APRAALTRL

SEQ ID NO: 5330 - protein, 9 aa, synthetic construct
APRAAREAL

SEQ ID NO: 5331 - protein, 10 aa, synthetic construct
APRAGPDPRL

SEQ ID NO: 5332 - protein, 9 aa, synthetic construct
APRAGPGQL

SEQ ID NO: 5333 - protein, 10 aa, synthetic construct
APRAGPGQLF

SEQ ID NO: 5334 - protein, 9 aa, synthetic construct
APRALLLLL

SEQ ID NO: 5335 - protein, 10 aa, synthetic construct
APRALLQDVL

SEQ ID NO: 5336 - protein, 9 aa, synthetic construct
APRAPAAGL

SEQ ID NO: 5337 - protein, 11 aa, synthetic construct
APRAPPGPAGL

SEQ ID NO: 5338 - protein, 8 aa, synthetic construct
APRAPSAL

SEQ ID NO: 5339 - protein, 10 aa, synthetic construct
APRDAYWIAM

SEQ ID NO: 5340 - protein, 11 aa, synthetic construct
APREALAQTVL

SEQ ID NO: 5341 - protein, 11 aa, synthetic construct
APREGISQEAL

SEQ ID NO: 5342 - protein, 9 aa, synthetic construct
APRELGLGL

SEQ ID NO: 5343 - protein, 11 aa, synthetic construct
APRFISPASQL

SEQ ID NO: 5344 - protein, 10 aa, synthetic construct
APRFPSALGL

SEQ ID NO: 5345 - protein, 9 aa, synthetic construct
APRGPGAEL

SEQ ID NO: 5346 - protein, 9 aa, synthetic construct
APRHGSLGF

SEQ ID NO: 5347 - protein, 11 aa, synthetic construct
APRHVDRSDFF

SEQ ID NO: 5348 - protein, 10 aa, synthetic construct
APRIALHTAL

SEQ ID NO: 5349 - protein, 10 aa, synthetic construct
APRKGSFSAL

SEQ ID NO: 5350 - protein, 10 aa, synthetic construct
APRKGTVWSL

SEQ ID NO: 5351 - protein, 9 aa, synthetic construct
APRKPDWDL

SEQ ID NO: 5352 - protein, 9 aa, synthetic construct
APRLETKSL

SEQ ID NO: 5353 - protein, 11 aa, synthetic construct
APRLNSADRPM

SEQ ID NO: 5354 - protein, 10 aa, synthetic construct
APRLPLPYGF

SEQ ID NO: 5355 - protein, 9 aa, synthetic construct
APRLPSTML

SEQ ID NO: 5356 - protein, 11 aa, synthetic construct
APRLQSEVAEL

SEQ ID NO: 5357 - protein, 11 aa, synthetic construct
APRPASGPIRP

SEQ ID NO: 5358 - protein, 11 aa, synthetic construct
APRPDRLVNRL

SEQ ID NO: 5359 - protein, 9 aa, synthetic construct
APRPGLLSL

SEQ ID NO: 5360 - protein, 11 aa, synthetic construct
APRPLPAGGRL

SEQ ID NO: 5361 - protein, 9 aa, synthetic construct
APRPPPKPM

SEQ ID NO: 5362 - protein, 11 aa, synthetic construct
APRPPQDLIGL

SEQ ID NO: 5363 - protein, 9 aa, synthetic construct
APRPRPRTF

SEQ ID NO: 5364 - protein, 11 aa, synthetic construct
APRPSTGPHKL

SEQ ID NO: 5365 - protein, 9 aa, synthetic construct
APRPYASSL

SEQ ID NO: 5366 - protein, 9 aa, synthetic construct
APRQPGLMA

SEQ ID NO: 5367 - protein, 11 aa, synthetic construct
APRQPGLMAQM

SEQ ID NO: 5368 - protein, 10 aa, synthetic construct
APRSVAVSSI

SEQ ID NO: 5369 - protein, 9 aa, synthetic construct
APRTFGLTL

SEQ ID NO: 5370 - protein, 10 aa, synthetic construct
APRTPGRHGL

SEQ ID NO: 5371 - protein, 11 aa, synthetic construct
APRTVLLLLSA

SEQ ID NO: 5372 - protein, 9 aa, synthetic construct
APRVFPVLW

SEQ ID NO: 5373 - protein, 9 aa, synthetic construct
APRVPVQAL

SEQ ID NO: 5374 - protein, 10 aa, synthetic construct
APRWGNPRAL

SEQ ID NO: 5375 - protein, 11 aa, synthetic construct
APRWLEEEAAL

SEQ ID NO: 5376 - protein, 11 aa, synthetic construct
APSAAKLLVQL

SEQ ID NO: 5377 - protein, 9 aa, synthetic construct
APSAKVKLL

SEQ ID NO: 5378 - protein, 11 aa, synthetic construct
APSDLRTIQTF

SEQ ID NO: 5379 - protein, 10 aa, synthetic construct
APSDNRVTSF

SEQ ID NO: 5380 - protein, 9 aa, synthetic construct
APSESFVVL

SEQ ID NO: 5381 - protein, 11 aa, synthetic construct
APSGTRVVQVL

SEQ ID NO: 5382 - protein, 11 aa, synthetic construct
APSIHGHDYVK

SEQ ID NO: 5383 - protein, 10 aa, synthetic construct
APSLFHLNTL

SEQ ID NO: 5384 - protein, 11 aa, synthetic construct
APSLINSSSTL

SEQ ID NO: 5385 - protein, 9 aa, synthetic construct
APSLKNAAF

SEQ ID NO: 5386 - protein, 9 aa, synthetic construct
APSLKQFSL

SEQ ID NO: 5387 - protein, 10 aa, synthetic construct
APSPLRLMDL

SEQ ID NO: 5388 - protein, 9 aa, synthetic construct
APSPPLSGL

SEQ ID NO: 5389 - protein, 9 aa, synthetic construct
APSPRPLSL

SEQ ID NO: 5390 - protein, 9 aa, synthetic construct
APSPTALKL

SEQ ID NO: 5391 - protein, 9 aa, synthetic construct
APSPVIPRL

SEQ ID NO: 5392 - protein, 10 aa, synthetic construct
APSQQRLVVV

SEQ ID NO: 5393 - protein, 10 aa, synthetic construct
APSSYDPLAL

SEQ ID NO: 5394 - protein, 9 aa, synthetic construct
APSVVKVSY

SEQ ID NO: 5395 - protein, 11 aa, synthetic construct
APTAQKSLSSL

SEQ ID NO: 5396 - protein, 9 aa, synthetic construct
APTVVSGIL

SEQ ID NO: 5397 - protein, 10 aa, synthetic construct
APVGGHILSY

SEQ ID NO: 5398 - protein, 9 aa, synthetic construct
APVISVLLL

SEQ ID NO: 5399 - protein, 9 aa, synthetic construct
APVKIAVIF

SEQ ID NO: 5400 - protein, 9 aa, synthetic construct
APVKMLPTY

SEQ ID NO: 5401 - protein, 9 aa, synthetic construct
APVMSMVTY

SEQ ID NO: 5402 - protein, 10 aa, synthetic construct
APVPTTTLVL

SEQ ID NO: 5403 - protein, 10 aa, synthetic construct
APVQPSQVEY

SEQ ID NO: 5404 - protein, 9 aa, synthetic construct
APVSFFLVL

SEQ ID NO: 5405 - protein, 9 aa, synthetic construct
APVYLAAVL

SEQ ID NO: 5406 - protein, 9 aa, synthetic construct
APVYMAAVI

SEQ ID NO: 5407 - protein, 11 aa, synthetic construct
APWIEQEGPEY

SEQ ID NO: 5408 - protein, 11 aa, synthetic construct
APWIESQDWAY

SEQ ID NO: 5409 - protein, 10 aa, synthetic construct
APWKKGLIAV

SEQ ID NO: 5410 - protein, 9 aa, synthetic construct
APWQVVPEL

SEQ ID NO: 5411 - protein, 10 aa, synthetic construct
APWSGRFYSL

SEQ ID NO: 5412 - protein, 11 aa, synthetic construct
APWVEQEGPEY

SEQ ID NO: 5413 - protein, 9 aa, synthetic construct
APYDENWFY

SEQ ID NO: 5414 - protein, 10 aa, synthetic construct
APYERRAMEL

SEQ ID NO: 5415 - protein, 9 aa, synthetic construct
APYGGPIAL

SEQ ID NO: 5416 - protein, 8 aa, synthetic construct
APYGRITL

SEQ ID NO: 5417 - protein, 9 aa, synthetic construct
APYQFLTAF

SEQ ID NO: 5418 - protein, 9 aa, synthetic construct
APMIKKIAF

SEQ ID NO: 5419 - protein, 11 aa, synthetic construct
AQFKPSSQILR

SEQ ID NO: 5420 - protein, 8 aa, synthetic construct
AQFKQLLI

SEQ ID NO: 5421 - protein, 9 aa, synthetic construct
AQFVLRNEI

SEQ ID NO: 5422 - protein, 8 aa, synthetic construct
AQFVLTVI

SEQ ID NO: 5423 - protein, 9 aa, synthetic construct
AQHCFIKSI

SEQ ID NO: 5424 - protein, 9 aa, synthetic construct
AQHKFLVAV

SEQ ID NO: 5425 - protein, 9 aa, synthetic construct
AQHPNIVTV

SEQ ID NO: 5426 - protein, 8 aa, synthetic construct
AQISWVTV

SEQ ID NO: 5427 - protein, 9 aa, synthetic construct
AQISWVTVF

SEQ ID NO: 5428 - protein, 8 aa, synthetic construct
AQITTLLV

SEQ ID NO: 5429 - protein, 11 aa, synthetic construct
AQKAEGAGDAK

SEQ ID NO: 5430 - protein, 8 aa, synthetic construct
AQKIEVRI

SEQ ID NO: 5431 - protein, 8 aa, synthetic construct
AQKKIPYV

SEQ ID NO: 5432 - protein, 8 aa, synthetic construct
AQKLLKKF

SEQ ID NO: 5433 - protein, 8 aa, synthetic construct
AQLGALFI

SEQ ID NO: 5434 - protein, 8 aa, synthetic construct
AQLILKAI

SEQ ID NO: 5435 - protein, 8 aa, synthetic construct
AQLIVQAI

SEQ ID NO: 5436 - protein, 8 aa, synthetic construct
AQLLQLKV

SEQ ID NO: 5437 - protein, 8 aa, synthetic construct
AQLLVLYY

SEQ ID NO: 5438 - protein, 9 aa, synthetic construct
AQLPDPPTI

SEQ ID NO: 5439 - protein, 8 aa, synthetic construct
AQLPVMVI

SEQ ID NO: 5440 - protein, 11 aa, synthetic construct
AQLRKLISEVD

SEQ ID NO: 5441 - protein, 8 aa, synthetic construct
AQLRVSEI

SEQ ID NO: 5442 - protein, 8 aa, synthetic construct
AQLMSLII

SEQ ID NO: 5443 - protein, 10 aa, synthetic construct
AQNVGTTHDL

SEQ ID NO: 5444 - protein, 11 aa, synthetic construct
AQNVGTTHDLL

SEQ ID NO: 5445 - protein, 8 aa, synthetic construct
AQQDLPTI

SEQ ID NO: 5446 - protein, 8 aa, synthetic construct
AQRLKFRL

SEQ ID NO: 5447 - protein, 9 aa, synthetic construct
AQSELDIYL

SEQ ID NO: 5448 - protein, 10 aa, synthetic construct
AQTAHIVLED

SEQ ID NO: 5449 - protein, 8 aa, synthetic construct
AQTFLSEI

SEQ ID NO: 5450 - protein, 8 aa, synthetic construct
AQTPIAVI

SEQ ID NO: 5451 - protein, 8 aa, synthetic construct
AQTVVLCV

SEQ ID NO: 5452 - protein, 9 aa, synthetic construct
AQWEETVTY

SEQ ID NO: 5453 - protein, 10 aa, synthetic construct
AQYEEIAQRS

SEQ ID NO: 5454 - protein, 9 aa, synthetic construct
AQYEHDLEV

SEQ ID NO: 5455 - protein, 8 aa, synthetic construct
AQYFLDKI

SEQ ID NO: 5456 - protein, 8 aa, synthetic construct
AQYKFIYV

SEQ ID NO: 5457 - protein, 9 aa, synthetic construct
AQYLINVRL

SEQ ID NO: 5458 - protein, 8 aa, synthetic construct
AQYPVVAV

SEQ ID NO: 5459 - protein, 9 aa, synthetic construct
AQYRLVTEI

SEQ ID NO: 5460 - protein, 8 aa, synthetic construct
AQMLIRIV

SEQ ID NO: 5461 - protein, 9 aa, synthetic construct
ARAANMFKM

SEQ ID NO: 5462 - protein, 10 aa, synthetic construct
ARADLIEVVM

SEQ ID NO: 5463 - protein, 9 aa, synthetic construct
ARAFPMPGF

SEQ ID NO: 5464 - protein, 9 aa, synthetic construct
ARAKFIPLI

SEQ ID NO: 5465 - protein, 9 aa, synthetic construct
ARALLLPLL

SEQ ID NO: 5466 - protein, 9 aa, synthetic construct
ARANLRLTL

SEQ ID NO: 5467 - protein, 11 aa, synthetic construct
ARDEIEAMIKR

SEQ ID NO: 5468 - protein, 9 aa, synthetic construct
ARDLLHPSL

SEQ ID NO: 5469 - protein, 9 aa, synthetic construct
ARDSTVLRL

SEQ ID NO: 5470 - protein, 9 aa, synthetic construct
ARFALTVVR

SEQ ID NO: 5471 - protein, 10 aa, synthetic construct
ARFDAYFHQK

SEQ ID NO: 5472 - protein, 11 aa, synthetic construct
ARFDGAEGSWF

SEQ ID NO: 5473 - protein, 11 aa, synthetic construct
ARFDPYGKNKF

SEQ ID NO: 5474 - protein, 9 aa, synthetic construct
ARFFKQPTF

SEQ ID NO: 5475 - protein, 9 aa, synthetic construct
ARFGLIQSM

SEQ ID NO: 5476 - protein, 11 aa, synthetic construct
ARFGPGGQLIK

SEQ ID NO: 5477 - protein, 9 aa, synthetic construct
ARFLFTTGF

SEQ ID NO: 5478 - protein, 9 aa, synthetic construct
ARFLHETGL

SEQ ID NO: 5479 - protein, 10 aa, synthetic construct
ARFLLEGQVF

SEQ ID NO: 5480 - protein, 9 aa, synthetic construct
ARFPIIASC

SEQ ID NO: 5481 - protein, 9 aa, synthetic construct
ARFSGNLLV

SEQ ID NO: 5482 - protein, 9 aa, synthetic construct
ARFSPKVSL

SEQ ID NO: 5483 - protein, 11 aa, synthetic construct
ARFSPKVSLPK

SEQ ID NO: 5484 - protein, 9 aa, synthetic construct
ARFSQPSAL

SEQ ID NO: 5485 - protein, 10 aa, synthetic construct
ARFTGAPLKV

SEQ ID NO: 5486 - protein, 11 aa, synthetic construct
ARFTGAPLKVH

SEQ ID NO: 5487 - protein, 10 aa, synthetic construct
ARFTGVGVSK

SEQ ID NO: 5488 - protein, 9 aa, synthetic construct
ARFYLPILV

SEQ ID NO: 5489 - protein, 10 aa, synthetic construct
ARGFLPYVGM

SEQ ID NO: 5490 - protein, 9 aa, synthetic construct
ARGMFVFGY

SEQ ID NO: 5491 - protein, 9 aa, synthetic construct
ARHELQVEM

SEQ ID NO: 5492 - protein, 9 aa, synthetic construct
ARHEYTFSI

SEQ ID NO: 5493 - protein, 9 aa, synthetic construct
ARHVVKVEY

SEQ ID NO: 5494 - protein, 9 aa, synthetic construct
ARIAKGLRL

SEQ ID NO: 5495 - protein, 9 aa, synthetic construct
ARIALLPLL

SEQ ID NO: 5496 - protein, 9 aa, synthetic construct
ARIEIGLHY

SEQ ID NO: 5497 - protein, 9 aa, synthetic construct
ARIKAINTF

SEQ ID NO: 5498 - protein, 10 aa, synthetic construct
ARIKQIKPLL

SEQ ID NO: 5499 - protein, 9 aa, synthetic construct
ARILIQERY

SEQ ID NO: 5500 - protein, 9 aa, synthetic construct
ARIPTKLEL

SEQ ID NO: 5501 - protein, 9 aa, synthetic construct
ARIQPMPYF

SEQ ID NO: 5502 - protein, 9 aa, synthetic construct
ARITSRIIR

SEQ ID NO: 5503 - protein, 9 aa, synthetic construct
ARKDIVARL

SEQ ID NO: 5504 - protein, 10 aa, synthetic construct
ARKGEFETGF

SEQ ID NO: 5505 - protein, 9 aa, synthetic construct
ARLAALVQR

SEQ ID NO: 5506 - protein, 10 aa, synthetic construct
ARLAGKELRF

SEQ ID NO: 5507 - protein, 10 aa, synthetic construct
ARLAHLGVQV

SEQ ID NO: 5508 - protein, 11 aa, synthetic construct
ARLALSPVPSH

SEQ ID NO: 5509 - protein, 9 aa, synthetic construct
ARLDLERKV

SEQ ID NO: 5510 - protein, 10 aa, synthetic construct
ARLDNLKAHL

SEQ ID NO: 5511 - protein, 11 aa, synthetic construct
ARLDWELEQRK

SEQ ID NO: 5512 - protein, 9 aa, synthetic construct
ARLEKAIAF

SEQ ID NO: 5513 - protein, 9 aa, synthetic construct
ARLFGIRAK

SEQ ID NO: 5514 - protein, 9 aa, synthetic construct
ARLGLVRCL

SEQ ID NO: 5515 - protein, 9 aa, synthetic construct
ARLGVISKV

SEQ ID NO: 5516 - protein, 9 aa, synthetic construct
ARLHLTVTR

SEQ ID NO: 5517 - protein, 8 aa, synthetic construct
ARLHPRAV

SEQ ID NO: 5518 - protein, 9 aa, synthetic construct
ARLKEVLEY

SEQ ID NO: 5519 - protein, 9 aa, synthetic construct
ARLKLAIKY

SEQ ID NO: 5520 - protein, 10 aa, synthetic construct
ARLLASKSLL

SEQ ID NO: 5521 - protein, 9 aa, synthetic construct
ARLPSLNKL

SEQ ID NO: 5522 - protein, 11 aa, synthetic construct
ARLPVEPHIGK

SEQ ID NO: 5523 - protein, 9 aa, synthetic construct
ARLQIVLGH

SEQ ID NO: 5524 - protein, 9 aa, synthetic construct
ARLQLERQL

SEQ ID NO: 5525 - protein, 11 aa, synthetic construct
ARLSAIYGGTY

SEQ ID NO: 5526 - protein, 9 aa, synthetic construct
ARLSIRPGL

SEQ ID NO: 5527 - protein, 9 aa, synthetic construct
ARLTDYVAF

SEQ ID NO: 5528 - protein, 9 aa, synthetic construct
ARLVEIAAK

SEQ ID NO: 5529 - protein, 10 aa, synthetic construct
ARNDPLLVGV

SEQ ID NO: 5530 - protein, 9 aa, synthetic construct
ARNITVIFH

SEQ ID NO: 5531 - protein, 9 aa, synthetic construct
ARNLPMDTF

SEQ ID NO: 5532 - protein, 9 aa, synthetic construct
ARNPPGFAF

SEQ ID NO: 5533 - protein, 11 aa, synthetic construct
ARNPSLKQQLF

SEQ ID NO: 5534 - protein, 10 aa, synthetic construct
ARNSVLMSGF

SEQ ID NO: 5535 - protein, 10 aa, synthetic construct
ARQDLSKILR

SEQ ID NO: 5536 - protein, 9 aa, synthetic construct
ARQYYMQYL

SEQ ID NO: 5537 - protein, 9 aa, synthetic construct
ARSALLRTV

SEQ ID NO: 5538 - protein, 10 aa, synthetic construct
ARSDKPIFTL

SEQ ID NO: 5539 - protein, 9 aa, synthetic construct
ARSLPPPKL

SEQ ID NO: 5540 - protein, 9 aa, synthetic construct
ARSLQKLGF

SEQ ID NO: 5541 - protein, 9 aa, synthetic construct
ARTKFAEEL

SEQ ID NO: 5542 - protein, 9 aa, synthetic construct
ARTPHWALF

SEQ ID NO: 5543 - protein, 10 aa, synthetic construct
ARTQILCSHL

SEQ ID NO: 5544 - protein, 9 aa, synthetic construct
ARTSVFLVR

SEQ ID NO: 5545 - protein, 9 aa, synthetic construct
ARTSYLAAF

SEQ ID NO: 5546 - protein, 10 aa, synthetic construct
ARTVIPINKL

SEQ ID NO: 5547 - protein, 9 aa, synthetic construct
ARTVMLFNL

SEQ ID NO: 5548 - protein, 9 aa, synthetic construct
ARVEVKATF

SEQ ID NO: 5549 - protein, 9 aa, synthetic construct
ARVFLQNLL

SEQ ID NO: 5550 - protein, 9 aa, synthetic construct
ARVHIGQVI

SEQ ID NO: 5551 - protein, 10 aa, synthetic construct
ARVHIGQVIM

SEQ ID NO: 5552 - protein, 9 aa, synthetic construct
ARVIFITEY

SEQ ID NO: 5553 - protein, 9 aa, synthetic construct
ARVIIEKYY

SEQ ID NO: 5554 - protein, 9 aa, synthetic construct
ARVKLVTEL

SEQ ID NO: 5555 - protein, 9 aa, synthetic construct
ARVKMQVTM

SEQ ID NO: 5556 - protein, 9 aa, synthetic construct
ARVKVFSKF

SEQ ID NO: 5557 - protein, 10 aa, synthetic construct
ARVLDALVAR

SEQ ID NO: 5558 - protein, 10 aa, synthetic construct
ARVSLFQNCF

SEQ ID NO: 5559 - protein, 10 aa, synthetic construct
ARVSLVRKEL

SEQ ID NO: 5560 - protein, 10 aa, synthetic construct
ARVVPLNQSF

SEQ ID NO: 5561 - protein, 9 aa, synthetic construct
ARVVPVPLL

SEQ ID NO: 5562 - protein, 9 aa, synthetic construct
ARVWSLMRF

SEQ ID NO: 5563 - protein, 9 aa, synthetic construct
ARWFHILGM

SEQ ID NO: 5564 - protein, 9 aa, synthetic construct
ARWTCCALL

SEQ ID NO: 5565 - protein, 9 aa, synthetic construct
ARWVEVLGF

SEQ ID NO: 5566 - protein, 9 aa, synthetic construct
ARYGLHVRF

SEQ ID NO: 5567 - protein, 9 aa, synthetic construct
ARYHLVQQL

SEQ ID NO: 5568 - protein, 9 aa, synthetic construct
ARYKLLVEL

SEQ ID NO: 5569 - protein, 9 aa, synthetic construct
ARYPNRFKL

SEQ ID NO: 5570 - protein, 9 aa, synthetic construct
ARYTNGHLF

SEQ ID NO: 5571 - protein, 9 aa, synthetic construct
ARMQAALLY

SEQ ID NO: 5572 - protein, 9 aa, synthetic construct
ASADPFPQV

SEQ ID NO: 5573 - protein, 9 aa, synthetic construct
ASDAAPLQY

SEQ ID NO: 5574 - protein, 9 aa, synthetic construct
ASDEAGEKE

SEQ ID NO: 5575 - protein, 9 aa, synthetic construct
ASDRNIVLY

SEQ ID NO: 5576 - protein, 9 aa, synthetic construct
ASDYFDQLY

SEQ ID NO: 5577 - protein, 9 aa, synthetic construct
ASEDSVLLY

SEQ ID NO: 5578 - protein, 10 aa, synthetic construct
ASEFPGAQHY

SEQ ID NO: 5579 - protein, 9 aa, synthetic construct
ASETGFLTY

SEQ ID NO: 5580 - protein, 9 aa, synthetic construct
ASEYDQIRY

SEQ ID NO: 5581 - protein, 10 aa, synthetic construct
ASFDGRISVY

SEQ ID NO: 5582 - protein, 8 aa, synthetic construct
ASGLIHRV

SEQ ID NO: 5583 - protein, 8 aa, synthetic construct
ASIDLPGI

SEQ ID NO: 5584 - protein, 9 aa, synthetic construct
ASLADIMAK

SEQ ID NO: 5585 - protein, 11 aa, synthetic construct
ASLDISRKWEK

SEQ ID NO: 5586 - protein, 9 aa, synthetic construct
ASLGLKFNK

SEQ ID NO: 5587 - protein, 9 aa, synthetic construct
ASLLCCGPK

SEQ ID NO: 5588 - protein, 10 aa, synthetic construct
ASLMHSFILK

SEQ ID NO: 5589 - protein, 9 aa, synthetic construct
ASPESISSL

SEQ ID NO: 5590 - protein, 9 aa, synthetic construct
ASPKVRLSL

SEQ ID NO: 5591 - protein, 8 aa, synthetic construct
ASPVVHIR

SEQ ID NO: 5592 - protein, 9 aa, synthetic construct
ASSPLITVF

SEQ ID NO: 5593 - protein, 10 aa, synthetic construct
ASTSTTIRSH

SEQ ID NO: 5594 - protein, 10 aa, synthetic construct
ASVNFSEFSK

SEQ ID NO: 5595 - protein, 9 aa, synthetic construct
ASYVNLPTI

SEQ ID NO: 5596 - protein, 10 aa, synthetic construct
ATAAEARLSL

SEQ ID NO: 5597 - protein, 9 aa, synthetic construct
ATAELIMSR

SEQ ID NO: 5598 - protein, 10 aa, synthetic construct
ATAGIIGVNR

SEQ ID NO: 5599 - protein, 9 aa, synthetic construct
ATALEYVYK

SEQ ID NO: 5600 - protein, 9 aa, synthetic construct
ATDDITELY

SEQ ID NO: 5601 - protein, 9 aa, synthetic construct
ATDFKFAMY

SEQ ID NO: 5602 - protein, 9 aa, synthetic construct
ATDIPCLLY

SEQ ID NO: 5603 - protein, 9 aa, synthetic construct
ATDKDNGIL

SEQ ID NO: 5604 - protein, 9 aa, synthetic construct
ATDPNILGR

SEQ ID NO: 5605 - protein, 10 aa, synthetic construct
ATDPVTGDLY

SEQ ID NO: 5606 - protein, 9 aa, synthetic construct
ATDRWYDEY

SEQ ID NO: 5607 - protein, 9 aa, synthetic construct
ATDYHVRVY

SEQ ID NO: 5608 - protein, 9 aa, synthetic construct
ATDYTFAMY

SEQ ID NO: 5609 - protein, 10 aa, synthetic construct
ATEDPWKTNY

SEQ ID NO: 5610 - protein, 10 aa, synthetic construct
ATEESFFILK

SEQ ID NO: 5611 - protein, 9 aa, synthetic construct
ATEFIMNEY

SEQ ID NO: 5612 - protein, 11 aa, synthetic construct
ATESPDTGLYY

SEQ ID NO: 5613 - protein, 10 aa, synthetic construct
ATFEKIPFER

SEQ ID NO: 5614 - protein, 9 aa, synthetic construct
ATFPDPNVK

SEQ ID NO: 5615 - protein, 10 aa, synthetic construct
ATGDMSGLLK

SEQ ID NO: 5616 - protein, 10 aa, synthetic construct
ATGYTFAFPF

SEQ ID NO: 5617 - protein, 11 aa, synthetic construct
ATIAGGGVIPH

SEQ ID NO: 5618 - protein, 9 aa, synthetic construct
ATIGELAQV

SEQ ID NO: 5619 - protein, 9 aa, synthetic construct
ATIIDILTK

SEQ ID NO: 5620 - protein, 11 aa, synthetic construct
ATILAGDVKVK

SEQ ID NO: 5621 - protein, 10 aa, synthetic construct
ATISMTTVGY

SEQ ID NO: 5622 - protein, 11 aa, synthetic construct
ATKAVCVLKGD

SEQ ID NO: 5623 - protein, 9 aa, synthetic construct
ATLETILRH

SEQ ID NO: 5624 - protein, 9 aa, synthetic construct
ATLQNVLRK

SEQ ID NO: 5625 - protein, 9 aa, synthetic construct
ATLSICSPK

SEQ ID NO: 5626 - protein, 11 aa, synthetic construct
ATLTKLEEFRS

SEQ ID NO: 5627 - protein, 11 aa, synthetic construct
ATMVPSVLWPR

SEQ ID NO: 5628 - protein, 10 aa, synthetic construct
ATPAGDIMEL

SEQ ID NO: 5629 - protein, 11 aa, synthetic construct
ATPEQISMDLK

SEQ ID NO: 5630 - protein, 10 aa, synthetic construct
ATQMVRMILK

SEQ ID NO: 5631 - protein, 10 aa, synthetic construct
ATQTQFFHVK

SEQ ID NO: 5632 - protein, 9 aa, synthetic construct
ATRLQELLK

SEQ ID NO: 5633 - protein, 9 aa, synthetic construct
ATTDWIAIY

SEQ ID NO: 5634 - protein, 9 aa, synthetic construct
ATVQQLEGR

SEQ ID NO: 5635 - protein, 10 aa, synthetic construct
ATVQQLEGRW

SEQ ID NO: 5636 - protein, 10 aa, synthetic construct
AVADKVHLMY

SEQ ID NO: 5637 - protein, 11 aa, synthetic construct
AVADKVHLMYK

SEQ ID NO: 5638 - protein, 9 aa, synthetic construct
AVAEKMLQY

SEQ ID NO: 5639 - protein, 9 aa, synthetic construct
AVAKHFVAL

SEQ ID NO: 5640 - protein, 9 aa, synthetic construct
AVALPLQTK

SEQ ID NO: 5641 - protein, 9 aa, synthetic construct
AVAPVASAL

SEQ ID NO: 5642 - protein, 10 aa, synthetic construct
AVAVDVAVPK

SEQ ID NO: 5643 - protein, 10 aa, synthetic construct
AVDPNRAVPL

SEQ ID NO: 5644 - protein, 9 aa, synthetic construct
AVEPGRPPL

SEQ ID NO: 5645 - protein, 10 aa, synthetic construct
AVFPKPFVEK

SEQ ID NO: 5646 - protein, 8 aa, synthetic construct
AVGHIYYF

SEQ ID NO: 5647 - protein, 11 aa, synthetic construct
AVIGADSVTLK

SEQ ID NO: 5648 - protein, 9 aa, synthetic construct
AVKARLAAL

SEQ ID NO: 5649 - protein, 8 aa, synthetic construct
AVKLKLLL

SEQ ID NO: 5650 - protein, 9 aa, synthetic construct
AVKQRGISL

SEQ ID NO: 5651 - protein, 9 aa, synthetic construct
AVKRKIQVL

SEQ ID NO: 5652 - protein, 10 aa, synthetic construct
AVLYQPLFDK

SEQ ID NO: 5653 - protein, 10 aa, synthetic construct
AVMGAYVLLK

SEQ ID NO: 5654 - protein, 9 aa, synthetic construct
AVNTSLIAL

SEQ ID NO: 5655 - protein, 10 aa, synthetic construct
AVPLNLIGLK

SEQ ID NO: 5656 - protein, 10 aa, synthetic construct
AVPTNIIAAK

SEQ ID NO: 5657 - protein, 9 aa, synthetic construct
AVQRLKVAL

SEQ ID NO: 5658 - protein, 11 aa, synthetic construct
AVQTAAKELLK

SEQ ID NO: 5659 - protein, 10 aa, synthetic construct
AVQYKTQVVA

SEQ ID NO: 5660 - protein, 10 aa, synthetic construct
AVREATVAAF

SEQ ID NO: 5661 - protein, 9 aa, synthetic construct
AVSQIVTVY

SEQ ID NO: 5662 - protein, 8 aa, synthetic construct
AVTAYQNI

SEQ ID NO: 5663 - protein, 10 aa, synthetic construct
AVVGAVVFQK

SEQ ID NO: 5664 - protein, 9 aa, synthetic construct
AVVNAIGLY

SEQ ID NO: 5665 - protein, 8 aa, synthetic construct
AVVPLVGK

SEQ ID NO: 5666 - protein, 9 aa, synthetic construct
AVYEHPSIL

SEQ ID NO: 5667 - protein, 11 aa, synthetic construct
AVYGMLNLTPK

SEQ ID NO: 5668 - protein, 10 aa, synthetic construct
AVYSAAILEY

SEQ ID NO: 5669 - protein, 8 aa, synthetic construct
AWDESGVF

SEQ ID NO: 5670 - protein, 9 aa, synthetic construct
AYAGSGNVL

SEQ ID NO: 5671 - protein, 8 aa, synthetic construct
AYDGKDYI

SEQ ID NO: 5672 - protein, 10 aa, synthetic construct
AYDGKDYIAL

SEQ ID NO: 5673 - protein, 9 aa, synthetic construct
AYDKAVASF

SEQ ID NO: 5674 - protein, 9 aa, synthetic construct
AYDPYLIAM

SEQ ID NO: 5675 - protein, 9 aa, synthetic construct
AYDTVRWEF

SEQ ID NO: 5676 - protein, 9 aa, synthetic construct
AYGLVSATF

SEQ ID NO: 5677 - protein, 9 aa, synthetic construct
AYGNVFSAF

SEQ ID NO: 5678 - protein, 9 aa, synthetic construct
AYHELAQVY

SEQ ID NO: 5679 - protein, 9 aa, synthetic construct
AYILDTLVF

SEQ ID NO: 5680 - protein, 9 aa, synthetic construct
AYKDAIYVF

SEQ ID NO: 5681 - protein, 8 aa, synthetic construct
AYKFGKTV

SEQ ID NO: 5682 - protein, 9 aa, synthetic construct
AYKNVKFVL

SEQ ID NO: 5683 - protein, 9 aa, synthetic construct
AYLFDTFPQ

SEQ ID NO: 5684 - protein, 9 aa, synthetic construct
AYLKAIVLF

SEQ ID NO: 5685 - protein, 9 aa, synthetic construct
AYLSGMLRF

SEQ ID NO: 5686 - protein, 9 aa, synthetic construct
AYPTVKFYF

SEQ ID NO: 5687 - protein, 9 aa, synthetic construct
AYRQGHFTY

SEQ ID NO: 5688 - protein, 9 aa, synthetic construct
AYSSYVHQY

SEQ ID NO: 5689 - protein, 9 aa, synthetic construct
AYVEWFNRL

SEQ ID NO: 5690 - protein, 9 aa, synthetic construct
AYVLLKRES

SEQ ID NO: 5691 - protein, 11 aa, synthetic construct
AYVSFGPHAGK

SEQ ID NO: 5692 - protein, 9 aa, synthetic construct
AMASLGALA

SEQ ID NO: 5693 - protein, 10 aa, synthetic construct
AMASLGALAL

SEQ ID NO: 5694 - protein, 11 aa, synthetic construct
AMASLGALALL

SEQ ID NO: 5695 - protein, 9 aa, synthetic construct
AMIDGQSAF

SEQ ID NO: 5696 - protein, 9 aa, synthetic construct
AMIELVERL

SEQ ID NO: 5697 - protein, 9 aa, synthetic construct
AMKPKPLSV

SEQ ID NO: 5698 - protein, 8 aa, synthetic construct
AMLCILTV

SEQ ID NO: 5699 - protein, 9 aa, synthetic construct
AMLDTVVFK

SEQ ID NO: 5700 - protein, 9 aa, synthetic construct
AMNDILAQV

SEQ ID NO: 5701 - protein, 9 aa, synthetic construct
AMNPTNTVF

SEQ ID NO: 5702 - protein, 9 aa, synthetic construct
AMNSQILEV

SEQ ID NO: 5703 - protein, 9 aa, synthetic construct
AMPFYSASL

SEQ ID NO: 5704 - protein, 8 aa, synthetic construct
AMPLALLV

SEQ ID NO: 5705 - protein, 9 aa, synthetic construct
AMPLALLVL

SEQ ID NO: 5706 - protein, 9 aa, synthetic construct
AMQEYIAVV

SEQ ID NO: 5707 - protein, 9 aa, synthetic construct
AMRLGAEVY

SEQ ID NO: 5708 - protein, 9 aa, synthetic construct
AMTDLILLM

SEQ ID NO: 5709 - protein, 8 aa, synthetic construct
AMYECKVI

SEQ ID NO: 5710 - protein, 8 aa, synthetic construct
AMYPFKKV

SEQ ID NO: 5711 - protein, 9 aa, synthetic construct
AMYPHIFYF

SEQ ID NO: 5712 - protein, 9 aa, synthetic construct
CADPVYKVY

SEQ ID NO: 5713 - protein, 9 aa, synthetic construct
CAIAQAESL

SEQ ID NO: 5714 - protein, 9 aa, synthetic construct
CEKIHFIAP

SEQ ID NO: 5715 - protein, 9 aa, synthetic construct
CFDDATLGF

SEQ ID NO: 5716 - protein, 9 aa, synthetic construct
CGFQDDVAY

SEQ ID NO: 5717 - protein, 9 aa, synthetic construct
CKPHFQQLF

SEQ ID NO: 5718 - protein, 9 aa, synthetic construct
CLADELINA

SEQ ID NO: 5719 - protein, 9 aa, synthetic construct
CLADHLLTA

SEQ ID NO: 5720 - protein, 9 aa, synthetic construct
CLAEELPHI

SEQ ID NO: 5721 - protein, 9 aa, synthetic construct
CLFDRVVNV

SEQ ID NO: 5722 - protein, 9 aa, synthetic construct
CLVDHSSLL

SEQ ID NO: 5723 - protein, 9 aa, synthetic construct
CLYGNVEKV

SEQ ID NO: 5724 - protein, 10 aa, synthetic construct
CPASLRDVAY

SEQ ID NO: 5725 - protein, 10 aa, synthetic construct
CPDPGEVPEY

SEQ ID NO: 5726 - protein, 11 aa, synthetic construct
CPRVINLHEVY

SEQ ID NO: 5727 - protein, 11 aa, synthetic construct
CPSAKGAIILY

SEQ ID NO: 5728 - protein, 9 aa, synthetic construct
CPYIEFESF

SEQ ID NO: 5729 - protein, 8 aa, synthetic construct
CQANFISI

SEQ ID NO: 5730 - protein, 8 aa, synthetic construct
CQICITYI

SEQ ID NO: 5731 - protein, 8 aa, synthetic construct
CQLRVLEV

SEQ ID NO: 5732 - protein, 8 aa, synthetic construct
CQYRVSML

SEQ ID NO: 5733 - protein, 9 aa, synthetic construct
CRCEGTIYL

SEQ ID NO: 5734 - protein, 9 aa, synthetic construct
CRFLHEIQL

SEQ ID NO: 5735 - protein, 9 aa, synthetic construct
CRGVNAIVY

SEQ ID NO: 5736 - protein, 8 aa, synthetic construct
CSFRVLVV

SEQ ID NO: 5737 - protein, 11 aa, synthetic construct
CTIDEKRLAGY

SEQ ID NO: 5738 - protein, 9 aa, synthetic construct
CTYGKPVTF

SEQ ID NO: 5739 - protein, 9 aa, synthetic construct
CVAIFVFMF

SEQ ID NO: 5740 - protein, 9 aa, synthetic construct
CVAPTIHVY

SEQ ID NO: 5741 - protein, 9 aa, synthetic construct
CVSNIVRSL

SEQ ID NO: 5742 - protein, 9 aa, synthetic construct
CYDLGAAYF

SEQ ID NO: 5743 - protein, 9 aa, synthetic construct
DAAICTTEY

SEQ ID NO: 5744 - protein, 9 aa, synthetic construct
DAANLRETF

SEQ ID NO: 5745 - protein, 9 aa, synthetic construct
DACELIERY

SEQ ID NO: 5746 - protein, 9 aa, synthetic construct
DACRYLQTY

SEQ ID NO: 5747 - protein, 9 aa, synthetic construct
DAFANFANF

SEQ ID NO: 5748 - protein, 9 aa, synthetic construct
DAFDFNVAL

SEQ ID NO: 5749 - protein, 9 aa, synthetic construct
DAFEFHEAF

SEQ ID NO: 5750 - protein, 10 aa, synthetic construct
DAFKSGIVQY

SEQ ID NO: 5751 - protein, 9 aa, synthetic construct
DAFLASESL

SEQ ID NO: 5752 - protein, 10 aa, synthetic construct
DAFLEQAVSY

SEQ ID NO: 5753 - protein, 8 aa, synthetic construct
DAFLNDSY

SEQ ID NO: 5754 - protein, 10 aa, synthetic construct
DAFPACKVEF

SEQ ID NO: 5755 - protein, 8 aa, synthetic construct
DAFPKRIL

SEQ ID NO: 5756 - protein, 9 aa, synthetic construct
DAFPLLSAY

SEQ ID NO: 5757 - protein, 9 aa, synthetic construct
DAFYAAVEM

SEQ ID NO: 5758 - protein, 8 aa, synthetic construct
DAHGSFCF

SEQ ID NO: 5759 - protein, 9 aa, synthetic construct
DAHIRLWDL

SEQ ID NO: 5760 - protein, 9 aa, synthetic construct
DAHLRPTSL

SEQ ID NO: 5761 - protein, 9 aa, synthetic construct
DAHPTLVTY

SEQ ID NO: 5762 - protein, 8 aa, synthetic construct
DAIKKFVV

SEQ ID NO: 5763 - protein, 8 aa, synthetic construct
DAIQFIRQ

SEQ ID NO: 5764 - protein, 9 aa, synthetic construct
DAIRLFAAY

SEQ ID NO: 5765 - protein, 8 aa, synthetic construct
DAISKSEL

SEQ ID NO: 5766 - protein, 9 aa, synthetic construct
DAISKTYSY

SEQ ID NO: 5767 - protein, 9 aa, synthetic construct
DAIYNMIGY

SEQ ID NO: 5768 - protein, 9 aa, synthetic construct
DAKFRLILI

SEQ ID NO: 5769 - protein, 8 aa, synthetic construct
DAKIKNII

SEQ ID NO: 5770 - protein, 9 aa, synthetic construct
DAKIRIFDL

SEQ ID NO: 5771 - protein, 8 aa, synthetic construct
DAKQKWLL

SEQ ID NO: 5772 - protein, 9 aa, synthetic construct
DAKQKWLLL

SEQ ID NO: 5773 - protein, 9 aa, synthetic construct
DAKSKIRAL

SEQ ID NO: 5774 - protein, 9 aa, synthetic construct
DAKTDQAQK

SEQ ID NO: 5775 - protein, 10 aa, synthetic construct
DALGNAIDGK

SEQ ID NO: 5776 - protein, 9 aa, synthetic construct
DALRCVNNY

SEQ ID NO: 5777 - protein, 9 aa, synthetic construct
DALSTVLQY

SEQ ID NO: 5778 - protein, 9 aa, synthetic construct
DALVKAKEL

SEQ ID NO: 5779 - protein, 9 aa, synthetic construct
DANFTVVVM

SEQ ID NO: 5780 - protein, 8 aa, synthetic construct
DAPAHHLF

SEQ ID NO: 5781 - protein, 9 aa, synthetic construct
DARWEIHAY

SEQ ID NO: 5782 - protein, 9 aa, synthetic construct
DASKVVTVF

SEQ ID NO: 5783 - protein, 10 aa, synthetic construct
DASPFILPSY

SEQ ID NO: 5784 - protein, 9 aa, synthetic construct
DASPVQAVF

SEQ ID NO: 5785 - protein, 9 aa, synthetic construct
DATQVYVAF

SEQ ID NO: 5786 - protein, 9 aa, synthetic construct
DAVDVTQDY

SEQ ID NO: 5787 - protein, 9 aa, synthetic construct
DAVHADVYR

SEQ ID NO: 5788 - protein, 9 aa, synthetic construct
DAVPMSLSY

SEQ ID NO: 5789 - protein, 9 aa, synthetic construct
DAVRTKMVY

SEQ ID NO: 5790 - protein, 8 aa, synthetic construct
DAVVKHVL

SEQ ID NO: 5791 - protein, 10 aa, synthetic construct
DAWAVGAIAY

SEQ ID NO: 5792 - protein, 10 aa, synthetic construct
DAWEGKGVSY

SEQ ID NO: 5793 - protein, 9 aa, synthetic construct
DAWIEHDVW

SEQ ID NO: 5794 - protein, 9 aa, synthetic construct
DAYELKHAL

SEQ ID NO: 5795 - protein, 8 aa, synthetic construct
DAYIRIVL

SEQ ID NO: 5796 - protein, 9 aa, synthetic construct
DAYPEIEKF

SEQ ID NO: 5797 - protein, 9 aa, synthetic construct
DAYQEDLGF

SEQ ID NO: 5798 - protein, 10 aa, synthetic construct
DAYRQGHFTY

SEQ ID NO: 5799 - protein, 9 aa, synthetic construct
DAYRRIHSL

SEQ ID NO: 5800 - protein, 11 aa, synthetic construct
DAYSGGAVNLY

SEQ ID NO: 5801 - protein, 9 aa, synthetic construct
DAMKNFSEF

SEQ ID NO: 5802 - protein, 9 aa, synthetic construct
DAMWEDYEF

SEQ ID NO: 5803 - protein, 9 aa, synthetic construct
DCFKTIISY

SEQ ID NO: 5804 - protein, 9 aa, synthetic construct
DCLLVNLAY

SEQ ID NO: 5805 - protein, 8 aa, synthetic construct
DDGHTFNY

SEQ ID NO: 5806 - protein, 9 aa, synthetic construct
DDLTDPAPA

SEQ ID NO: 5807 - protein, 10 aa, synthetic construct
DDLTIKLVIK

SEQ ID NO: 5808 - protein, 11 aa, synthetic construct
DEAGEKEAKSD

SEQ ID NO: 5809 - protein, 11 aa, synthetic construct
DEFKPLVEEPQ

SEQ ID NO: 5810 - protein, 9 aa, synthetic construct
DEIEEHNIK

SEQ ID NO: 5811 - protein, 10 aa, synthetic construct
DEIERKFDKW

SEQ ID NO: 5812 - protein, 9 aa, synthetic construct
DENSVIKSF

SEQ ID NO: 5813 - protein, 9 aa, synthetic construct
DERLRINSL

SEQ ID NO: 5814 - protein, 10 aa, synthetic construct
DESGPSIVHR

SEQ ID NO: 5815 - protein, 8 aa, synthetic construct
DFDIKTVL

SEQ ID NO: 5816 - protein, 9 aa, synthetic construct
DFDMTLSRF

SEQ ID NO: 5817 - protein, 8 aa, synthetic construct
DFKDKIVL

SEQ ID NO: 5818 - protein, 8 aa, synthetic construct
DFKGKVLI

SEQ ID NO: 5819 - protein, 9 aa, synthetic construct
DFKIKTVEL

SEQ ID NO: 5820 - protein, 9 aa, synthetic construct
DFKIKCVAF

SEQ ID NO: 5821 - protein, 9 aa, synthetic construct
DFKIRTIEL

SEQ ID NO: 5822 - protein, 9 aa, synthetic construct
DFKIRTVEI

SEQ ID NO: 5823 - protein, 8 aa, synthetic construct
DFLLKPEL

SEQ ID NO: 5824 - protein, 9 aa, synthetic construct
DFQIRPHAL

SEQ ID NO: 5825 - protein, 9 aa, synthetic construct
DFREKIIAI

SEQ ID NO: 5826 - protein, 11 aa, synthetic construct
DFVHVIQQGKT

SEQ ID NO: 5827 - protein, 9 aa, synthetic construct
DFYFDENPY

SEQ ID NO: 5828 - protein, 9 aa, synthetic construct
DGFPAGQEL

SEQ ID NO: 5829 - protein, 11 aa, synthetic construct
DGGLSIPHSTK

SEQ ID NO: 5830 - protein, 8 aa, synthetic construct
DGKLKVTL

SEQ ID NO: 5831 - protein, 8 aa, synthetic construct
DGKSHWVF

SEQ ID NO: 5832 - protein, 8 aa, synthetic construct
DGKYSQVL

SEQ ID NO: 5833 - protein, 8 aa, synthetic construct
DGNHRLTL

SEQ ID NO: 5834 - protein, 9 aa, synthetic construct
DGPVVTDPK

SEQ ID NO: 5835 - protein, 11 aa, synthetic construct
DGQVITIGNER

SEQ ID NO: 5836 - protein, 9 aa, synthetic construct
DGYIDYAEF

SEQ ID NO: 5837 - protein, 9 aa, synthetic construct
DGYIDYYEF

SEQ ID NO: 5838 - protein, 9 aa, synthetic construct
DGYLEVIGF

SEQ ID NO: 5839 - protein, 9 aa, synthetic construct
DIAQVNLKY

SEQ ID NO: 5840 - protein, 11 aa, synthetic construct
DIAVDGEPLGR

SEQ ID NO: 5841 - protein, 9 aa, synthetic construct
DIFSYLVEY

SEQ ID NO: 5842 - protein, 8 aa, synthetic construct
DIGVVTYE

SEQ ID NO: 5843 - protein, 9 aa, synthetic construct
DIHHKVLSL

SEQ ID NO: 5844 - protein, 9 aa, synthetic construct
DIIKKPIAL

SEQ ID NO: 5845 - protein, 8 aa, synthetic construct
DIIRKQVL

SEQ ID NO: 5846 - protein, 9 aa, synthetic construct
DIIYKKIAL

SEQ ID NO: 5847 - protein, 8 aa, synthetic construct
DIKAANVL

SEQ ID NO: 5848 - protein, 9 aa, synthetic construct
DIKARALQV

SEQ ID NO: 5849 - protein, 9 aa, synthetic construct
DIKEIVPLF

SEQ ID NO: 5850 - protein, 9 aa, synthetic construct
DIKEKLCYV

SEQ ID NO: 5851 - protein, 8 aa, synthetic construct
DIKIKWFL

SEQ ID NO: 5852 - protein, 8 aa, synthetic construct
DIKKIFEF

SEQ ID NO: 5853 - protein, 9 aa, synthetic construct
DIKKILDSV

SEQ ID NO: 5854 - protein, 11 aa, synthetic construct
DIKLKDIEHAL

SEQ ID NO: 5855 - protein, 8 aa, synthetic construct
DIKLKNVL

SEQ ID NO: 5856 - protein, 9 aa, synthetic construct
DIKLKNVLL

SEQ ID NO: 5857 - protein, 9 aa, synthetic construct
DIKRGIPNY

SEQ ID NO: 5858 - protein, 9 aa, synthetic construct
DIKRKTWVL

SEQ ID NO: 5859 - protein, 9 aa, synthetic construct
DIKSKIRAL

SEQ ID NO: 5860 - protein, 9 aa, synthetic construct
DIKVLQSAL

SEQ ID NO: 5861 - protein, 9 aa, synthetic construct
DIKVYMPKL

SEQ ID NO: 5862 - protein, 9 aa, synthetic construct
DILKRLYEL

SEQ ID NO: 5863 - protein, 8 aa, synthetic construct
DILPKKIL

SEQ ID NO: 5864 - protein, 9 aa, synthetic construct
DILSRIHTI

SEQ ID NO: 5865 - protein, 9 aa, synthetic construct
DINPHIPQY

SEQ ID NO: 5866 - protein, 9 aa, synthetic construct
DIPDVISFF

SEQ ID NO: 5867 - protein, 10 aa, synthetic construct
DIPENVDITL

SEQ ID NO: 5868 - protein, 9 aa, synthetic construct
DIPETCVHY

SEQ ID NO: 5869 - protein, 11 aa, synthetic construct
DIPHMDIEALK

SEQ ID NO: 5870 - protein, 8 aa, synthetic construct
DIPIHNAL

SEQ ID NO: 5871 - protein, 9 aa, synthetic construct
DIRAFDSRF

SEQ ID NO: 5872 - protein, 9 aa, synthetic construct
DIRKKRLQL

SEQ ID NO: 5873 - protein, 9 aa, synthetic construct
DIRLMVMEI

SEQ ID NO: 5874 - protein, 8 aa, synthetic construct
DIRPKISL

SEQ ID NO: 5875 - protein, 9 aa, synthetic construct
DISKRIQSL

SEQ ID NO: 5876 - protein, 10 aa, synthetic construct
DISPVDNHRY

SEQ ID NO: 5877 - protein, 8 aa, synthetic construct
DITKGVQY

SEQ ID NO: 5878 - protein, 8 aa, synthetic construct
DIWKKFEL

SEQ ID NO: 5879 - protein, 8 aa, synthetic construct
DIYEKQQL

SEQ ID NO: 5880 - protein, 10 aa, synthetic construct
DIYESPNHLY

SEQ ID NO: 5881 - protein, 8 aa, synthetic construct
DKLEELIR

SEQ ID NO: 5882 - protein, 11 aa, synthetic construct
DKVMKVMGSGP

SEQ ID NO: 5883 - protein, 9 aa, synthetic construct
DLAKKAYAL

SEQ ID NO: 5884 - protein, 9 aa, synthetic construct
DLANIRSEY

SEQ ID NO: 5885 - protein, 8 aa, synthetic construct
DLAVHIAH

SEQ ID NO: 5886 - protein, 9 aa, synthetic construct
DLDLSPLEY

SEQ ID NO: 5887 - protein, 9 aa, synthetic construct
DLERKVESL

SEQ ID NO: 5888 - protein, 9 aa, synthetic construct
DLFRKALEL

SEQ ID NO: 5889 - protein, 8 aa, synthetic construct
DLGKKIAL

SEQ ID NO: 5890 - protein, 9 aa, synthetic construct
DLHARIERI

SEQ ID NO: 5891 - protein, 9 aa, synthetic construct
DLHEKDFSL

SEQ ID NO: 5892 - protein, 10 aa, synthetic construct
DLHSPSEIVK

SEQ ID NO: 5893 - protein, 8 aa, synthetic construct
DLIEKVVI

SEQ ID NO: 5894 - protein, 9 aa, synthetic construct
DLIESMLEY

SEQ ID NO: 5895 - protein, 8 aa, synthetic construct
DLIFHVAL

SEQ ID NO: 5896 - protein, 9 aa, synthetic construct
DLIGKLTSL

SEQ ID NO: 5897 - protein, 9 aa, synthetic construct
DLIIKGISV

SEQ ID NO: 5898 - protein, 11 aa, synthetic construct
DLINKSVEARK

SEQ ID NO: 5899 - protein, 9 aa, synthetic construct
DLINSLPLY

SEQ ID NO: 5900 - protein, 9 aa, synthetic construct
DLIQSKCLS

SEQ ID NO: 5901 - protein, 8 aa, synthetic construct
DLKAASKL

SEQ ID NO: 5902 - protein, 8 aa, synthetic construct
DLKAYLRS

SEQ ID NO: 5903 - protein, 8 aa, synthetic construct
DLKEKVSL

SEQ ID NO: 5904 - protein, 9 aa, synthetic construct
DLKEKVSLL

SEQ ID NO: 5905 - protein, 9 aa, synthetic construct
DLKHDFQAL

SEQ ID NO: 5906 - protein, 9 aa, synthetic construct
DLKHTGAVL

SEQ ID NO: 5907 - protein, 9 aa, synthetic construct
DLKIKRSKL

SEQ ID NO: 5908 - protein, 9 aa, synthetic construct
DLKKITNSL

SEQ ID NO: 5909 - protein, 8 aa, synthetic construct
DLKKLIAA

SEQ ID NO: 5910 - protein, 9 aa, synthetic construct
DLKKLPLEV

SEQ ID NO: 5911 - protein, 9 aa, synthetic construct
DLKKRIMVL

SEQ ID NO: 5912 - protein, 9 aa, synthetic construct
DLKLRKFVF

SEQ ID NO: 5913 - protein, 9 aa, synthetic construct
DLKPHNILI

SEQ ID NO: 5914 - protein, 9 aa, synthetic construct
DLKPKVYNL

SEQ ID NO: 5915 - protein, 9 aa, synthetic construct
DLKPRNIFL

SEQ ID NO: 5916 - protein, 9 aa, synthetic construct
DLKQKVENL

SEQ ID NO: 5917 - protein, 9 aa, synthetic construct
DLKRHVEFL

SEQ ID NO: 5918 - protein, 9 aa, synthetic construct
DLKTKVLVL

SEQ ID NO: 5919 - protein, 9 aa, synthetic construct
DLKVKLTEV

SEQ ID NO: 5920 - protein, 9 aa, synthetic construct
DLKVLFTSL

SEQ ID NO: 5921 - protein, 9 aa, synthetic construct
DLLEKSFSL

SEQ ID NO: 5922 - protein, 9 aa, synthetic construct
DLLHRALAV

SEQ ID NO: 5923 - protein, 11 aa, synthetic construct
DLLPKEKRHVL

SEQ ID NO: 5924 - protein, 8 aa, synthetic construct
DLLPKREL

SEQ ID NO: 5925 - protein, 8 aa, synthetic construct
DLLQKHTL

SEQ ID NO: 5926 - protein, 9 aa, synthetic construct
DLLRKVGAL

SEQ ID NO: 5927 - protein, 9 aa, synthetic construct
DLLRRVLVL

SEQ ID NO: 5928 - protein, 8 aa, synthetic construct
DLLTKERL

SEQ ID NO: 5929 - protein, 8 aa, synthetic construct
DLLTRHKL

SEQ ID NO: 5930 - protein, 9 aa, synthetic construct
DLMAHMASK

SEQ ID NO: 5931 - protein, 9 aa, synthetic construct
DLNEKARAL

SEQ ID NO: 5932 - protein, 9 aa, synthetic construct
DLNKRVQDL

SEQ ID NO: 5933 - protein, 9 aa, synthetic construct
DLPDHLLSY

SEQ ID NO: 5934 - protein, 8 aa, synthetic construct
DLPEHAVL

SEQ ID NO: 5935 - protein, 9 aa, synthetic construct
DLPNGRVCP

SEQ ID NO: 5936 - protein, 9 aa, synthetic construct
DLQARITSL

SEQ ID NO: 5937 - protein, 10 aa, synthetic construct
DLQHGSLFLR

SEQ ID NO: 5938 - protein, 9 aa, synthetic construct
DLQKRLLAL

SEQ ID NO: 5939 - protein, 9 aa, synthetic construct
DLRIKSQEL

SEQ ID NO: 5940 - protein, 9 aa, synthetic construct
DLRKKLFRI

SEQ ID NO: 5941 - protein, 9 aa, synthetic construct
DLRKLGSSL

SEQ ID NO: 5942 - protein, 8 aa, synthetic construct
DLRKTSLF

SEQ ID NO: 5943 - protein, 9 aa, synthetic construct
DLRSKLTSL

SEQ ID NO: 5944 - protein, 10 aa, synthetic construct
DLRTKATIEL

SEQ ID NO: 5945 - protein, 9 aa, synthetic construct
DLRTKGFSL

SEQ ID NO: 5946 - protein, 8 aa, synthetic construct
DLRTRVVL

SEQ ID NO: 5947 - protein, 8 aa, synthetic construct
DLRVKGIL

SEQ ID NO: 5948 - protein, 10 aa, synthetic construct
DLSPDDPQVQ

SEQ ID NO: 5949 - protein, 9 aa, synthetic construct
DLSPITVKY

SEQ ID NO: 5950 - protein, 8 aa, synthetic construct
DLSSHLAK

SEQ ID NO: 5951 - protein, 10 aa, synthetic construct
DLTCAVITEF

SEQ ID NO: 5952 - protein, 8 aa, synthetic construct
DLVKKYIL

SEQ ID NO: 5953 - protein, 8 aa, synthetic construct
DLVVKKEL

SEQ ID NO: 5954 - protein, 9 aa, synthetic construct
DLWLEREVF

SEQ ID NO: 5955 - protein, 8 aa, synthetic construct
DLYKRFIL

SEQ ID NO: 5956 - protein, 9 aa, synthetic construct
DLYSRQYQL

SEQ ID NO: 5957 - protein, 9 aa, synthetic construct
DLNGLLSSL

SEQ ID NO: 5958 - protein, 9 aa, synthetic construct
DMDKVLLKY

SEQ ID NO: 5959 - protein, 9 aa, synthetic construct
DMIREVCGF

SEQ ID NO: 5960 - protein, 8 aa, synthetic construct
DNMKKIIL

SEQ ID NO: 5961 - protein, 9 aa, synthetic construct
DPADETEAD

SEQ ID NO: 5962 - protein, 10 aa, synthetic construct
DPFECNMCGY

SEQ ID NO: 5963 - protein, 9 aa, synthetic construct
DPFGHSPTM

SEQ ID NO: 5964 - protein, 9 aa, synthetic construct
DPFIDLNYM

SEQ ID NO: 5965 - protein, 9 aa, synthetic construct
DPFKHFVGM

SEQ ID NO: 5966 - protein, 9 aa, synthetic construct
DPFPDHVVF

SEQ ID NO: 5967 - protein, 9 aa, synthetic construct
DPFRDLHSL

SEQ ID NO: 5968 - protein, 9 aa, synthetic construct
DPFSEGIMF

SEQ ID NO: 5969 - protein, 9 aa, synthetic construct
DPFSVTEAL

SEQ ID NO: 5970 - protein, 9 aa, synthetic construct
DPFVGSDPF

SEQ ID NO: 5971 - protein, 9 aa, synthetic construct
DPGSVIVAF

SEQ ID NO: 5972 - protein, 9 aa, synthetic construct
DPIHTFDLY

SEQ ID NO: 5973 - protein, 8 aa, synthetic construct
DPLQKEEL

SEQ ID NO: 5974 - protein, 8 aa, synthetic construct
DPLYKEAL

SEQ ID NO: 5975 - protein, 8 aa, synthetic construct
DPNFKNRL

SEQ ID NO: 5976 - protein, 9 aa, synthetic construct
DPNLEFVAM

SEQ ID NO: 5977 - protein, 9 aa, synthetic construct
DPPLKFMSV

SEQ ID NO: 5978 - protein, 8 aa, synthetic construct
DPSVLGKY

SEQ ID NO: 5979 - protein, 8 aa, synthetic construct
DPTSGQLY

SEQ ID NO: 5980 - protein, 9 aa, synthetic construct
DPTSPLRTR

SEQ ID NO: 5981 - protein, 10 aa, synthetic construct
DPVKPPGSSL

SEQ ID NO: 5982 - protein, 9 aa, synthetic construct
DPVPYQPPF

SEQ ID NO: 5983 - protein, 8 aa, synthetic construct
DPYVKKLL

SEQ ID NO: 5984 - protein, 10 aa, synthetic construct
DPYYGYDDGY

SEQ ID NO: 5985 - protein, 9 aa, synthetic construct
DPMKARVVL

SEQ ID NO: 5986 - protein, 9 aa, synthetic construct
DQFQKVLSL

SEQ ID NO: 5987 - protein, 10 aa, synthetic construct
DQLKPQVSWI

SEQ ID NO: 5988 - protein, 9 aa, synthetic construct
DQLVDLEVP

SEQ ID NO: 5989 - protein, 8 aa, synthetic construct
DQYKFYSV

SEQ ID NO: 5990 - protein, 9 aa, synthetic construct
DRLLRIRAL

SEQ ID NO: 5991 - protein, 8 aa, synthetic construct
DSDLQLDR

SEQ ID NO: 5992 - protein, 9 aa, synthetic construct
DSDPFSSFY

SEQ ID NO: 5993 - protein, 9 aa, synthetic construct
DSDSDLQLY

SEQ ID NO: 5994 - protein, 9 aa, synthetic construct
DSESSGVLY

SEQ ID NO: 5995 - protein, 10 aa, synthetic construct
DSFPMEIRQY

SEQ ID NO: 5996 - protein, 9 aa, synthetic construct
DSFVLVTAY

SEQ ID NO: 5997 - protein, 9 aa, synthetic construct
DSIDAISMF

SEQ ID NO: 5998 - protein, 8 aa, synthetic construct
DSILKSEL

SEQ ID NO: 5999 - protein, 9 aa, synthetic construct
DSIPLSSGY

SEQ ID NO: 6000 - protein, 8 aa, synthetic construct
DSKLKVKL

SEQ ID NO: 6001 - protein, 8 aa, synthetic construct
DSLHRFVL

SEQ ID NO: 6002 - protein, 8 aa, synthetic construct
DSLIKATI

SEQ ID NO: 6003 - protein, 10 aa, synthetic construct
DSLKLKKDSL

SEQ ID NO: 6004 - protein, 9 aa, synthetic construct
DSLLENLEK

SEQ ID NO: 6005 - protein, 9 aa, synthetic construct
DSNGAILVY

SEQ ID NO: 6006 - protein, 8 aa, synthetic construct
DSRIHVCL

SEQ ID NO: 6007 - protein, 8 aa, synthetic construct
DSRLHVIF

SEQ ID NO: 6008 - protein, 11 aa, synthetic construct
DSSLASLVGNL

SEQ ID NO: 6009 - protein, 10 aa, synthetic construct
DSSTVTHLFK

SEQ ID NO: 6010 - protein, 11 aa, synthetic construct
DSSVNFAEFSK

SEQ ID NO: 6011 - protein, 9 aa, synthetic construct
DSTTLEHQK

SEQ ID NO: 6012 - protein, 8 aa, synthetic construct
DTAVRHVL

SEQ ID NO: 6013 - protein, 9 aa, synthetic construct
DTCRLALVY

SEQ ID NO: 6014 - protein, 9 aa, synthetic construct
DTDEYVLKY

SEQ ID NO: 6015 - protein, 9 aa, synthetic construct
DTDHYFLRY

SEQ ID NO: 6016 - protein, 8 aa, synthetic construct
DTEEHHLR

SEQ ID NO: 6017 - protein, 8 aa, synthetic construct
DTEHAVIR

SEQ ID NO: 6018 - protein, 9 aa, synthetic construct
DTGRILSKL

SEQ ID NO: 6019 - protein, 11 aa, synthetic construct
DTGRPSTTVRY

SEQ ID NO: 6020 - protein, 9 aa, synthetic construct
DTIARLPCL

SEQ ID NO: 6021 - protein, 10 aa, synthetic construct
DTIGYLLTRY

SEQ ID NO: 6022 - protein, 9 aa, synthetic construct
DTINLNSFF

SEQ ID NO: 6023 - protein, 9 aa, synthetic construct
DTISKMNDF

SEQ ID NO: 6024 - protein, 9 aa, synthetic construct
DTISPTLGF

SEQ ID NO: 6025 - protein, 9 aa, synthetic construct
DTKPLIVQY

SEQ ID NO: 6026 - protein, 9 aa, synthetic construct
DTKQMMSSF

SEQ ID NO: 6027 - protein, 10 aa, synthetic construct
DTPGHVDFSY

SEQ ID NO: 6028 - protein, 9 aa, synthetic construct
DTRDYICEF

SEQ ID NO: 6029 - protein, 8 aa, synthetic construct
DTRGKFIL

SEQ ID NO: 6030 - protein, 11 aa, synthetic construct
DTSRPLGDSMY

SEQ ID NO: 6031 - protein, 9 aa, synthetic construct
DTVQLVSGF

SEQ ID NO: 6032 - protein, 9 aa, synthetic construct
DTVRFVHVY

SEQ ID NO: 6033 - protein, 9 aa, synthetic construct
DTVSTFTSY

SEQ ID NO: 6034 - protein, 11 aa, synthetic construct
DTVTSAVMMQY

SEQ ID NO: 6035 - protein, 10 aa, synthetic construct
DTYCEDLTKY

SEQ ID NO: 6036 - protein, 8 aa, synthetic construct
DTYKKWKL

SEQ ID NO: 6037 - protein, 9 aa, synthetic construct
DVAASEFFR

SEQ ID NO: 6038 - protein, 11 aa, synthetic construct
DVAHSDLILHV

SEQ ID NO: 6039 - protein, 9 aa, synthetic construct
DVANKIGII

SEQ ID NO: 6040 - protein, 11 aa, synthetic construct
DVAPSTLLPSY

SEQ ID NO: 6041 - protein, 11 aa, synthetic construct
DVASGQVVRKF

SEQ ID NO: 6042 - protein, 9 aa, synthetic construct
DVASQVALY

SEQ ID NO: 6043 - protein, 9 aa, synthetic construct
DVDPETLSY

SEQ ID NO: 6044 - protein, 9 aa, synthetic construct
DVFAFIITM

SEQ ID NO: 6045 - protein, 10 aa, synthetic construct
DVFNEKGWNY

SEQ ID NO: 6046 - protein, 10 aa, synthetic construct
DVFNFEETVY

SEQ ID NO: 6047 - protein, 11 aa, synthetic construct
DVFQQQTGGVY

SEQ ID NO: 6048 - protein, 9 aa, synthetic construct
DVFRGTRFS

SEQ ID NO: 6049 - protein, 9 aa, synthetic construct
DVFSIIQEY

SEQ ID NO: 6050 - protein, 9 aa, synthetic construct
DVFTVVISY

SEQ ID NO: 6051 - protein, 10 aa, synthetic construct
DVIAQGIGKL

SEQ ID NO: 6052 - protein, 9 aa, synthetic construct
DVIETCMAY

SEQ ID NO: 6053 - protein, 11 aa, synthetic construct
DVIGVTKGKGY

SEQ ID NO: 6054 - protein, 9 aa, synthetic construct
DVIHARQAY

SEQ ID NO: 6055 - protein, 9 aa, synthetic construct
DVIQAGKEY

SEQ ID NO: 6056 - protein, 9 aa, synthetic construct
DVIRLIGQH

SEQ ID NO: 6057 - protein, 9 aa, synthetic construct
DVISRIDRM

SEQ ID NO: 6058 - protein, 9 aa, synthetic construct
DVITCFANF

SEQ ID NO: 6059 - protein, 9 aa, synthetic construct
DVKAKLHEL

SEQ ID NO: 6060 - protein, 9 aa, synthetic construct
DVKDVIEQY

SEQ ID NO: 6061 - protein, 10 aa, synthetic construct
DVKDVLDSVL

SEQ ID NO: 6062 - protein, 9 aa, synthetic construct
DVKDYIQEY

SEQ ID NO: 6063 - protein, 9 aa, synthetic construct
DVKDYLRNM

SEQ ID NO: 6064 - protein, 9 aa, synthetic construct
DVKEKIFQL

SEQ ID NO: 6065 - protein, 9 aa, synthetic construct
DVKELIPEF

SEQ ID NO: 6066 - protein, 10 aa, synthetic construct
DVKGGTLTQY

SEQ ID NO: 6067 - protein, 9 aa, synthetic construct
DVKGRIYQL

SEQ ID NO: 6068 - protein, 9 aa, synthetic construct
DVKKRILEF

SEQ ID NO: 6069 - protein, 9 aa, synthetic construct
DVKPFVPRF

SEQ ID NO: 6070 - protein, 10 aa, synthetic construct
DVLDFGDLTY

SEQ ID NO: 6071 - protein, 9 aa, synthetic construct
DVLESVNLL

SEQ ID NO: 6072 - protein, 9 aa, synthetic construct
DVLHQIFSK

SEQ ID NO: 6073 - protein, 9 aa, synthetic construct
DVLIESIAF

SEQ ID NO: 6074 - protein, 9 aa, synthetic construct
DVLSGKVSA

SEQ ID NO: 6075 - protein, 10 aa, synthetic construct
DVNHFAPDEL

SEQ ID NO: 6076 - protein, 8 aa, synthetic construct
DVPAFQAL

SEQ ID NO: 6077 - protein, 9 aa, synthetic construct
DVPEFLVYF

SEQ ID NO: 6078 - protein, 9 aa, synthetic construct
DVPEKSSLF

SEQ ID NO: 6079 - protein, 9 aa, synthetic construct
DVPEKWAKF

SEQ ID NO: 6080 - protein, 9 aa, synthetic construct
DVPEKWARF

SEQ ID NO: 6081 - protein, 10 aa, synthetic construct
DVPSFGPACY

SEQ ID NO: 6082 - protein, 9 aa, synthetic construct
DVQKKLMSL

SEQ ID NO: 6083 - protein, 9 aa, synthetic construct
DVRVKVERL

SEQ ID NO: 6084 - protein, 8 aa, synthetic construct
DVSPFLEG

SEQ ID NO: 6085 - protein, 9 aa, synthetic construct
DVTEQISRF

SEQ ID NO: 6086 - protein, 9 aa, synthetic construct
DVTQVSSAY

SEQ ID NO: 6087 - protein, 9 aa, synthetic construct
DVVDRILKS

SEQ ID NO: 6088 - protein, 10 aa, synthetic construct
DVVDSCSMLY

SEQ ID NO: 6089 - protein, 11 aa, synthetic construct
DVVDSEALQVY

SEQ ID NO: 6090 - protein, 9 aa, synthetic construct
DVVFLITKY

SEQ ID NO: 6091 - protein, 8 aa, synthetic construct
DVVHPAAK

SEQ ID NO: 6092 - protein, 9 aa, synthetic construct
DVVIVSSKY

SEQ ID NO: 6093 - protein, 9 aa, synthetic construct
DVVKRLLSL

SEQ ID NO: 6094 - protein, 9 aa, synthetic construct
DVVRVVGAY

SEQ ID NO: 6095 - protein, 9 aa, synthetic construct
DVVSLVQHY

SEQ ID NO: 6096 - protein, 10 aa, synthetic construct
DVYGFLVEHY

SEQ ID NO: 6097 - protein, 9 aa, synthetic construct
DVYGGTNRY

SEQ ID NO: 6098 - protein, 9 aa, synthetic construct
DVYNHFLLY

SEQ ID NO: 6099 - protein, 10 aa, synthetic construct
DVYPEIIERA

SEQ ID NO: 6100 - protein, 10 aa, synthetic construct
DVYTHVLSAF

SEQ ID NO: 6101 - protein, 9 aa, synthetic construct
DVMKDFEEM

SEQ ID NO: 6102 - protein, 9 aa, synthetic construct
DYDPLVVKL

SEQ ID NO: 6103 - protein, 9 aa, synthetic construct
DYFEFPREL

SEQ ID NO: 6104 - protein, 10 aa, synthetic construct
DYGSNYLYDN

SEQ ID NO: 6105 - protein, 8 aa, synthetic construct
DYKLHFIF

SEQ ID NO: 6106 - protein, 9 aa, synthetic construct
DYQALRTSI

SEQ ID NO: 6107 - protein, 9 aa, synthetic construct
DMALHYANK

SEQ ID NO: 6108 - protein, 9 aa, synthetic construct
DMALKSLSL

SEQ ID NO: 6109 - protein, 9 aa, synthetic construct
DMFAHPYQY

SEQ ID NO: 6110 - protein, 9 aa, synthetic construct
DMFYRNWAL

SEQ ID NO: 6111 - protein, 9 aa, synthetic construct
DMIKEFISM

SEQ ID NO: 6112 - protein, 9 aa, synthetic construct
DMIKRALDF

SEQ ID NO: 6113 - protein, 9 aa, synthetic construct
DMKIRFWDL

SEQ ID NO: 6114 - protein, 9 aa, synthetic construct
DMKRLIMVL

SEQ ID NO: 6115 - protein, 8 aa, synthetic construct
DMKTKYFF

SEQ ID NO: 6116 - protein, 9 aa, synthetic construct
DMKTKYFFF

SEQ ID NO: 6117 - protein, 8 aa, synthetic construct
DMLIRQLL

SEQ ID NO: 6118 - protein, 8 aa, synthetic construct
DMLLKEYL

SEQ ID NO: 6119 - protein, 9 aa, synthetic construct
DMLVKVNAL

SEQ ID NO: 6120 - protein, 9 aa, synthetic construct
DMPTNPAIL

SEQ ID NO: 6121 - protein, 9 aa, synthetic construct
EAAAMGAVY

SEQ ID NO: 6122 - protein, 9 aa, synthetic construct
EAAEAFLGF

SEQ ID NO: 6123 - protein, 9 aa, synthetic construct
EAAELAEIY

SEQ ID NO: 6124 - protein, 9 aa, synthetic construct
EAANFKLKY

SEQ ID NO: 6125 - protein, 9 aa, synthetic construct
EAANTMVNY

SEQ ID NO: 6126 - protein, 9 aa, synthetic construct
EAAQLLTSF

SEQ ID NO: 6127 - protein, 9 aa, synthetic construct
EAARLIEMY

SEQ ID NO: 6128 - protein, 9 aa, synthetic construct
EAAVAIKAM

SEQ ID NO: 6129 - protein, 9 aa, synthetic construct
EACDMALEL

SEQ ID NO: 6130 - protein, 9 aa, synthetic construct
EACFYNSDY

SEQ ID NO: 6131 - protein, 9 aa, synthetic construct
EACLLLAEY

SEQ ID NO: 6132 - protein, 9 aa, synthetic construct
EADVAQLEY

SEQ ID NO: 6133 - protein, 11 aa, synthetic construct
EAEAAHGTVTR

SEQ ID NO: 6134 - protein, 10 aa, synthetic construct
EAEPHPLWEY

SEQ ID NO: 6135 - protein, 11 aa, synthetic construct
EAFDELLASKY

SEQ ID NO: 6136 - protein, 9 aa, synthetic construct
EAFEGVIVF

SEQ ID NO: 6137 - protein, 10 aa, synthetic construct
EAFGQKIGHF

SEQ ID NO: 6138 - protein, 9 aa, synthetic construct
EAFGVGVEF

SEQ ID NO: 6139 - protein, 11 aa, synthetic construct
EAFKDSEGYIY

SEQ ID NO: 6140 - protein, 11 aa, synthetic construct
EAFKEASKVPF

SEQ ID NO: 6141 - protein, 8 aa, synthetic construct
EAFLKHIL

SEQ ID NO: 6142 - protein, 9 aa, synthetic construct
EAFLTTAEF

SEQ ID NO: 6143 - protein, 9 aa, synthetic construct
EAFQGTKVF

SEQ ID NO: 6144 - protein, 10 aa, synthetic construct
EAFQTTISKY

SEQ ID NO: 6145 - protein, 9 aa, synthetic construct
EAFSPVYKY

SEQ ID NO: 6146 - protein, 10 aa, synthetic construct
EAFTEMMEAY

SEQ ID NO: 6147 - protein, 8 aa, synthetic construct
EAFVRHIL

SEQ ID NO: 6148 - protein, 8 aa, synthetic construct
EAFYRQNL

SEQ ID NO: 6149 - protein, 10 aa, synthetic construct
EAGEKEAKSD

SEQ ID NO: 6150 - protein, 11 aa, synthetic construct
EAIDPEKLNVF

SEQ ID NO: 6151 - protein, 9 aa, synthetic construct
EAIFEISYF

SEQ ID NO: 6152 - protein, 9 aa, synthetic construct
EAIGIISKM

SEQ ID NO: 6153 - protein, 9 aa, synthetic construct
EAIIPGSVY

SEQ ID NO: 6154 - protein, 10 aa, synthetic construct
EAIKILKGEY

SEQ ID NO: 6155 - protein, 9 aa, synthetic construct
EAIRELNEY

SEQ ID NO: 6156 - protein, 8 aa, synthetic construct
EAKEKIYL

SEQ ID NO: 6157 - protein, 8 aa, synthetic construct
EAKFFTES

SEQ ID NO: 6158 - protein, 8 aa, synthetic construct
EAKFYEEV

SEQ ID NO: 6159 - protein, 8 aa, synthetic construct
EAKIKALL

SEQ ID NO: 6160 - protein, 9 aa, synthetic construct
EAKQRLQQL

SEQ ID NO: 6161 - protein, 9 aa, synthetic construct
EALALTQTW

SEQ ID NO: 6162 - protein, 9 aa, synthetic construct
EALDHMVEY

SEQ ID NO: 6163 - protein, 8 aa, synthetic construct
EALKKLIL

SEQ ID NO: 6164 - protein, 8 aa, synthetic construct
EALPKQSV

SEQ ID NO: 6165 - protein, 9 aa, synthetic construct
EALRDVLSY

SEQ ID NO: 6166 - protein, 10 aa, synthetic construct
EALSLGEVAY

SEQ ID NO: 6167 - protein, 10 aa, synthetic construct
EAMRIGAEVY

SEQ ID NO: 6168 - protein, 10 aa, synthetic construct
EANPSADLYY

SEQ ID NO: 6169 - protein, 9 aa, synthetic construct
EANQHELLY

SEQ ID NO: 6170 - protein, 9 aa, synthetic construct
EAPEEVEVL

SEQ ID NO: 6171 - protein, 9 aa, synthetic construct
EAQKLLEQY

SEQ ID NO: 6172 - protein, 10 aa, synthetic construct
EASAIVEYAY

SEQ ID NO: 6173 - protein, 9 aa, synthetic construct
EASKLLLTY

SEQ ID NO: 6174 - protein, 9 aa, synthetic construct
EASKYIMQY

SEQ ID NO: 6175 - protein, 11 aa, synthetic construct
EASLAETEGRY

SEQ ID NO: 6176 - protein, 9 aa, synthetic construct
EATDIALLL

SEQ ID NO: 6177 - protein, 9 aa, synthetic construct
EATLRCWAL

SEQ ID NO: 6178 - protein, 9 aa, synthetic construct
EATTLTIVF

SEQ ID NO: 6179 - protein, 9 aa, synthetic construct
EAVDVTPVM

SEQ ID NO: 6180 - protein, 9 aa, synthetic construct
EAVEVLLNY

SEQ ID NO: 6181 - protein, 9 aa, synthetic construct
EAVKIIHDF

SEQ ID NO: 6182 - protein, 9 aa, synthetic construct
EAVQAISMF

SEQ ID NO: 6183 - protein, 9 aa, synthetic construct
EAVRSIPEY

SEQ ID NO: 6184 - protein, 9 aa, synthetic construct
EAVTPSPSF

SEQ ID NO: 6185 - protein, 9 aa, synthetic construct
EAVWAVTNY

SEQ ID NO: 6186 - protein, 10 aa, synthetic construct
EAWADDVERF

SEQ ID NO: 6187 - protein, 10 aa, synthetic construct
EAWFSPVHTY

SEQ ID NO: 6188 - protein, 10 aa, synthetic construct
EAWHELAELY

SEQ ID NO: 6189 - protein, 8 aa, synthetic construct
EAWKKIQL

SEQ ID NO: 6190 - protein, 10 aa, synthetic construct
EAWLQEKLSF

SEQ ID NO: 6191 - protein, 10 aa, synthetic construct
EAWNEATNVY

SEQ ID NO: 6192 - protein, 11 aa, synthetic construct
EAWNEEGKAVW

SEQ ID NO: 6193 - protein, 9 aa, synthetic construct
EAYHSVIKY

SEQ ID NO: 6194 - protein, 9 aa, synthetic construct
EAYIDPIAM

SEQ ID NO: 6195 - protein, 9 aa, synthetic construct
EAYLRWWQL

SEQ ID NO: 6196 - protein, 9 aa, synthetic construct
EAYNAVVRY

SEQ ID NO: 6197 - protein, 9 aa, synthetic construct
EAYPDHTQF

SEQ ID NO: 6198 - protein, 9 aa, synthetic construct
EAYPGDVFY

SEQ ID NO: 6199 - protein, 9 aa, synthetic construct
EAMAFASIY

SEQ ID NO: 6200 - protein, 9 aa, synthetic construct
EAMNTQLEL

SEQ ID NO: 6201 - protein, 9 aa, synthetic construct
ECAAIRSSF

SEQ ID NO: 6202 - protein, 9 aa, synthetic construct
ECARAIYAY

SEQ ID NO: 6203 - protein, 9 aa, synthetic construct
ECIDYVEKY

SEQ ID NO: 6204 - protein, 9 aa, synthetic construct
ECSGVITAY

SEQ ID NO: 6205 - protein, 9 aa, synthetic construct
ECSNFLTSY

SEQ ID NO: 6206 - protein, 9 aa, synthetic construct
ECVKQICLV

SEQ ID NO: 6207 - protein, 11 aa, synthetic construct
EDAVHSGALND

SEQ ID NO: 6208 - protein, 8 aa, synthetic construct
EDENFILK

SEQ ID NO: 6209 - protein, 9 aa, synthetic construct
EEAEIIRKY

SEQ ID NO: 6210 - protein, 9 aa, synthetic construct
EEAYTTEHW

SEQ ID NO: 6211 - protein, 9 aa, synthetic construct
EECRLIIHL

SEQ ID NO: 6212 - protein, 10 aa, synthetic construct
EEDAALFKAW

SEQ ID NO: 6213 - protein, 9 aa, synthetic construct
EEFDFHVRW

SEQ ID NO: 6214 - protein, 8 aa, synthetic construct
EEFITPIV

SEQ ID NO: 6215 - protein, 10 aa, synthetic construct
EEFQGEWTAP

SEQ ID NO: 6216 - protein, 9 aa, synthetic construct
EEFRFGIKA

SEQ ID NO: 6217 - protein, 10 aa, synthetic construct
EEGKALAESW

SEQ ID NO: 6218 - protein, 8 aa, synthetic construct
EEIAVLSA

SEQ ID NO: 6219 - protein, 10 aa, synthetic construct
EEIDLRSVGW

SEQ ID NO: 6220 - protein, 10 aa, synthetic construct
EEIKDFLLTA

SEQ ID NO: 6221 - protein, 9 aa, synthetic construct
EEIKTLERY

SEQ ID NO: 6222 - protein, 10 aa, synthetic construct
EEISGPLTSA

SEQ ID NO: 6223 - protein, 9 aa, synthetic construct
EEITTGSAW

SEQ ID NO: 6224 - protein, 8 aa, synthetic construct
EEIVQPII

SEQ ID NO: 6225 - protein, 9 aa, synthetic construct
EEKLKLVAL

SEQ ID NO: 6226 - protein, 11 aa, synthetic construct
EELDPESREYW

SEQ ID NO: 6227 - protein, 10 aa, synthetic construct
EELLGDGHSY

SEQ ID NO: 6228 - protein, 9 aa, synthetic construct
EELPHIHAF

SEQ ID NO: 6229 - protein, 8 aa, synthetic construct
EENNNFSK

SEQ ID NO: 6230 - protein, 9 aa, synthetic construct
EENPIVLEF

SEQ ID NO: 6231 - protein, 8 aa, synthetic construct
EEQLQQIR

SEQ ID NO: 6232 - protein, 10 aa, synthetic construct
EEQLQQIRAE

SEQ ID NO: 6233 - protein, 9 aa, synthetic construct
EESDVDVQL

SEQ ID NO: 6234 - protein, 8 aa, synthetic construct
EESNYELE

SEQ ID NO: 6235 - protein, 9 aa, synthetic construct
EEVVTVETW

SEQ ID NO: 6236 - protein, 9 aa, synthetic construct
EEYAGQITL

SEQ ID NO: 6237 - protein, 9 aa, synthetic construct
EEYYPFSEV

SEQ ID NO: 6238 - protein, 9 aa, synthetic construct
EFDAGIIEL

SEQ ID NO: 6239 - protein, 9 aa, synthetic construct
EFDNAGAMM

SEQ ID NO: 6240 - protein, 8 aa, synthetic construct
EFEHQRAP

SEQ ID NO: 6241 - protein, 9 aa, synthetic construct
EFHLNESGD

SEQ ID NO: 6242 - protein, 8 aa, synthetic construct
EFHTELER

SEQ ID NO: 6243 - protein, 8 aa, synthetic construct
EFKFKLAL

SEQ ID NO: 6244 - protein, 8 aa, synthetic construct
EFKFNRKA

SEQ ID NO: 6245 - protein, 8 aa, synthetic construct
EFKTKYKL

SEQ ID NO: 6246 - protein, 8 aa, synthetic construct
EFLLHMLK

SEQ ID NO: 6247 - protein, 8 aa, synthetic construct
EFLLVPVI

SEQ ID NO: 6248 - protein, 9 aa, synthetic construct
EFYGRKLVV

SEQ ID NO: 6249 - protein, 9 aa, synthetic construct
EGFDRSTSL

SEQ ID NO: 6250 - protein, 9 aa, synthetic construct
EGFLKAQAL

SEQ ID NO: 6251 - protein, 9 aa, synthetic construct
EGKPRILSL

SEQ ID NO: 6252 - protein, 11 aa, synthetic construct
EGKPTIVEEDD

SEQ ID NO: 6253 - protein, 8 aa, synthetic construct
EGLIKHIL

SEQ ID NO: 6254 - protein, 9 aa, synthetic construct
EGLPEGIPF

SEQ ID NO: 6255 - protein, 9 aa, synthetic construct
EGLPENIPF

SEQ ID NO: 6256 - protein, 9 aa, synthetic construct
EGVIEFVSY

SEQ ID NO: 6257 - protein, 10 aa, synthetic construct
EGVLIVHEHR

SEQ ID NO: 6258 - protein, 9 aa, synthetic construct
EGWPEVVEM

SEQ ID NO: 6259 - protein, 11 aa, synthetic construct
EGYALPHAILR

SEQ ID NO: 6260 - protein, 8 aa, synthetic construct
EGYIKKLL

SEQ ID NO: 6261 - protein, 10 aa, synthetic construct
EHALLAYTLG

SEQ ID NO: 6262 - protein, 9 aa, synthetic construct
EHSDLSFSK

SEQ ID NO: 6263 - protein, 8 aa, synthetic construct
EHVIEALR

SEQ ID NO: 6264 - protein, 9 aa, synthetic construct
EIADIKSKY

SEQ ID NO: 6265 - protein, 11 aa, synthetic construct
EIAPHFAVNHF

SEQ ID NO: 6266 - protein, 9 aa, synthetic construct
EIAQVTSAY

SEQ ID NO: 6267 - protein, 10 aa, synthetic construct
EIASFECSGY

SEQ ID NO: 6268 - protein, 9 aa, synthetic construct
EIATYRTLL

SEQ ID NO: 6269 - protein, 9 aa, synthetic construct
EICDDIFAY

SEQ ID NO: 6270 - protein, 11 aa, synthetic construct
EIELQSQLALK

SEQ ID NO: 6271 - protein, 10 aa, synthetic construct
EIFDGIQPKM

SEQ ID NO: 6272 - protein, 9 aa, synthetic construct
EIFDGLLEY

SEQ ID NO: 6273 - protein, 9 aa, synthetic construct
EIFDKIHSL

SEQ ID NO: 6274 - protein, 9 aa, synthetic construct
EIIARIAQH

SEQ ID NO: 6275 - protein, 9 aa, synthetic construct
EIIDGTSEM

SEQ ID NO: 6276 - protein, 9 aa, synthetic construct
EIIEKNFDY

SEQ ID NO: 6277 - protein, 11 aa, synthetic construct
EIIGKRGIIGY

SEQ ID NO: 6278 - protein, 9 aa, synthetic construct
EIIGPYASW

SEQ ID NO: 6279 - protein, 10 aa, synthetic construct
EIIQIDGHIY

SEQ ID NO: 6280 - protein, 9 aa, synthetic construct
EIIRFLTNY

SEQ ID NO: 6281 - protein, 8 aa, synthetic construct
EIIRKYVL

SEQ ID NO: 6282 - protein, 9 aa, synthetic construct
EIISHISQH

SEQ ID NO: 6283 - protein, 10 aa, synthetic construct
EIITSTTSNY

SEQ ID NO: 6284 - protein, 9 aa, synthetic construct
EIKDILIQY

SEQ ID NO: 6285 - protein, 9 aa, synthetic construct
EIKDLLPEM

SEQ ID NO: 6286 - protein, 9 aa, synthetic construct
EIKEKICDY

SEQ ID NO: 6287 - protein, 9 aa, synthetic construct
EIKEKLLQL

SEQ ID NO: 6288 - protein, 9 aa, synthetic construct
EIKETLLSF

SEQ ID NO: 6289 - protein, 9 aa, synthetic construct
EIKKRFRQL

SEQ ID NO: 6290 - protein, 9 aa, synthetic construct
EIKQIVSEY

SEQ ID NO: 6291 - protein, 9 aa, synthetic construct
EIKQKFSEL

SEQ ID NO: 6292 - protein, 9 aa, synthetic construct
EIKRINKEL

SEQ ID NO: 6293 - protein, 9 aa, synthetic construct
EIKSKLASL

SEQ ID NO: 6294 - protein, 9 aa, synthetic construct
EIKTKIKEL

SEQ ID NO: 6295 - protein, 9 aa, synthetic construct
EIKVKLIEA

SEQ ID NO: 6296 - protein, 8 aa, synthetic construct
EILQIHTK

SEQ ID NO: 6297 - protein, 10 aa, synthetic construct
EINFLRALYD

SEQ ID NO: 6298 - protein, 10 aa, synthetic construct
EINGSALCSY

SEQ ID NO: 6299 - protein, 9 aa, synthetic construct
EIPASVSSY

SEQ ID NO: 6300 - protein, 8 aa, synthetic construct
EIPFEKKP

SEQ ID NO: 6301 - protein, 9 aa, synthetic construct
EIPSLQSIY

SEQ ID NO: 6302 - protein, 9 aa, synthetic construct
EIPTTMSTM

SEQ ID NO: 6303 - protein, 9 aa, synthetic construct
EIREKLIRL

SEQ ID NO: 6304 - protein, 9 aa, synthetic construct
EIRKVVQSL

SEQ ID NO: 6305 - protein, 9 aa, synthetic construct
EIRLKIVGT

SEQ ID NO: 6306 - protein, 8 aa, synthetic construct
EIRPRFPL

SEQ ID NO: 6307 - protein, 9 aa, synthetic construct
EIRQKNLSL

SEQ ID NO: 6308 - protein, 9 aa, synthetic construct
EISEVQLVY

SEQ ID NO: 6309 - protein, 9 aa, synthetic construct
EITDKLGLH

SEQ ID NO: 6310 - protein, 8 aa, synthetic construct
EITLTKAD

SEQ ID NO: 6311 - protein, 9 aa, synthetic construct
EIVDVVSDY

SEQ ID NO: 6312 - protein, 9 aa, synthetic construct
EIVEKIGVH

SEQ ID NO: 6313 - protein, 9 aa, synthetic construct
EIVGTLLGF

SEQ ID NO: 6314 - protein, 9 aa, synthetic construct
EIVHIQAGQ

SEQ ID NO: 6315 - protein, 9 aa, synthetic construct
EIVKEVSTY

SEQ ID NO: 6316 - protein, 9 aa, synthetic construct
EIVPRLPDY

SEQ ID NO: 6317 - protein, 9 aa, synthetic construct
EIVTTIPTI

SEQ ID NO: 6318 - protein, 9 aa, synthetic construct
EIYKYIVKY

SEQ ID NO: 6319 - protein, 10 aa, synthetic construct
EIYPPKLHQF

SEQ ID NO: 6320 - protein, 10 aa, synthetic construct
EIYSGKFCEC

SEQ ID NO: 6321 - protein, 9 aa, synthetic construct
EIYTDMGRF

SEQ ID NO: 6322 - protein, 10 aa, synthetic construct
EIMDRAYDSF

SEQ ID NO: 6323 - protein, 10 aa, synthetic construct
EKAKTLLDKA

SEQ ID NO: 6324 - protein, 8 aa, synthetic construct
EKKIKVIL

SEQ ID NO: 6325 - protein, 10 aa, synthetic construct
EKNATLLLPD

SEQ ID NO: 6326 - protein, 9 aa, synthetic construct
ELAKRVSRL

SEQ ID NO: 6327 - protein, 9 aa, synthetic construct
ELANIRSKF

SEQ ID NO: 6328 - protein, 9 aa, synthetic construct
ELAPNFQGY

SEQ ID NO: 6329 - protein, 9 aa, synthetic construct
ELAPSLPSY

SEQ ID NO: 6330 - protein, 11 aa, synthetic construct
ELDPMAMTQKY

SEQ ID NO: 6331 - protein, 9 aa, synthetic construct
ELDRFMHYY

SEQ ID NO: 6332 - protein, 9 aa, synthetic construct
ELDVRITAL

SEQ ID NO: 6333 - protein, 9 aa, synthetic construct
ELFLRRISL

SEQ ID NO: 6334 - protein, 9 aa, synthetic construct
ELFQKAKSL

SEQ ID NO: 6335 - protein, 9 aa, synthetic construct
ELFQRPNAL

SEQ ID NO: 6336 - protein, 9 aa, synthetic construct
ELHEKFDRL

SEQ ID NO: 6337 - protein, 11 aa, synthetic construct
ELHGEGSSSGK

SEQ ID NO: 6338 - protein, 9 aa, synthetic construct
ELHKKLLSV

SEQ ID NO: 6339 - protein, 9 aa, synthetic construct
ELIAEIGSL

SEQ ID NO: 6340 - protein, 9 aa, synthetic construct
ELIAKIPNF

SEQ ID NO: 6341 - protein, 9 aa, synthetic construct
ELIEQAAQY

SEQ ID NO: 6342 - protein, 11 aa, synthetic construct
ELIGNLVGHLY

SEQ ID NO: 6343 - protein, 11 aa, synthetic construct
ELIGQFGVGFY

SEQ ID NO: 6344 - protein, 8 aa, synthetic construct
ELIKKHLL

SEQ ID NO: 6345 - protein, 9 aa, synthetic construct
ELIRSMTAF

SEQ ID NO: 6346 - protein, 9 aa, synthetic construct
ELITKAVAA

SEQ ID NO: 6347 - protein, 9 aa, synthetic construct
ELKEKIAYL

SEQ ID NO: 6348 - protein, 9 aa, synthetic construct
ELKEKLRSI

SEQ ID NO: 6349 - protein, 9 aa, synthetic construct
ELKEKYISL

SEQ ID NO: 6350 - protein, 8 aa, synthetic construct
ELKIAYQL

SEQ ID NO: 6351 - protein, 9 aa, synthetic construct
ELKIKRSLF

SEQ ID NO: 6352 - protein, 9 aa, synthetic construct
ELKKVVALY

SEQ ID NO: 6353 - protein, 9 aa, synthetic construct
ELKQGLYEL

SEQ ID NO: 6354 - protein, 9 aa, synthetic construct
ELKQRARYL

SEQ ID NO: 6355 - protein, 9 aa, synthetic construct
ELKRKFEQL

SEQ ID NO: 6356 - protein, 9 aa, synthetic construct
ELKRKLNIL

SEQ ID NO: 6357 - protein, 9 aa, synthetic construct
ELLIRKLPF

SEQ ID NO: 6358 - protein, 8 aa, synthetic construct
ELLKRTAL

SEQ ID NO: 6359 - protein, 9 aa, synthetic construct
ELLQKGYGL

SEQ ID NO: 6360 - protein, 9 aa, synthetic construct
ELLTKALHL

SEQ ID NO: 6361 - protein, 9 aa, synthetic construct
ELNLRSNEL

SEQ ID NO: 6362 - protein, 9 aa, synthetic construct
ELNVRKVTL

SEQ ID NO: 6363 - protein, 9 aa, synthetic construct
ELPEFWEAL

SEQ ID NO: 6364 - protein, 9 aa, synthetic construct
ELQANKATL

SEQ ID NO: 6365 - protein, 9 aa, synthetic construct
ELQGHIGRF

SEQ ID NO: 6366 - protein, 8 aa, synthetic construct
ELQKRFIL

SEQ ID NO: 6367 - protein, 9 aa, synthetic construct
ELRELKESL

SEQ ID NO: 6368 - protein, 9 aa, synthetic construct
ELRKKVEVL

SEQ ID NO: 6369 - protein, 9 aa, synthetic construct
ELRLKPQLL

SEQ ID NO: 6370 - protein, 9 aa, synthetic construct
ELRRKIREL

SEQ ID NO: 6371 - protein, 9 aa, synthetic construct
ELSDVLIYL

SEQ ID NO: 6372 - protein, 10 aa, synthetic construct
ELSQMQTQIS

SEQ ID NO: 6373 - protein, 11 aa, synthetic construct
ELTAEGEEIAR

SEQ ID NO: 6374 - protein, 9 aa, synthetic construct
ELVERLQSY

SEQ ID NO: 6375 - protein, 8 aa, synthetic construct
ELVRKWSL

SEQ ID NO: 6376 - protein, 8 aa, synthetic construct
ELWQRVSL

SEQ ID NO: 6377 - protein, 10 aa, synthetic construct
ELYDRDLKHF

SEQ ID NO: 6378 - protein, 8 aa, synthetic construct
ELYKKVLL

SEQ ID NO: 6379 - protein, 11 aa, synthetic construct
ELYPYGELGHY

SEQ ID NO: 6380 - protein, 9 aa, synthetic construct
ELYSRQLYV

SEQ ID NO: 6381 - protein, 10 aa, synthetic construct
ELMHSIVGSY

SEQ ID NO: 6382 - protein, 10 aa, synthetic construct
ENAGEDPGLA

SEQ ID NO: 6383 - protein, 9 aa, synthetic construct
ENGDAKTDQ

SEQ ID NO: 6384 - protein, 9 aa, synthetic construct
ENIKDIPKF

SEQ ID NO: 6385 - protein, 10 aa, synthetic construct
ENPVLQQHFR

SEQ ID NO: 6386 - protein, 9 aa, synthetic construct
ENSFLSFVK

SEQ ID NO: 6387 - protein, 10 aa, synthetic construct
ENSFLSFVKE

SEQ ID NO: 6388 - protein, 9 aa, synthetic construct
ENVDIATVY

SEQ ID NO: 6389 - protein, 9 aa, synthetic construct
ENVLRIFLD

SEQ ID NO: 6390 - protein, 9 aa, synthetic construct
EPAFLSEEF

SEQ ID NO: 6391 - protein, 9 aa, synthetic construct
EPALPSTSY

SEQ ID NO: 6392 - protein, 9 aa, synthetic construct
EPARPDITY

SEQ ID NO: 6393 - protein, 9 aa, synthetic construct
EPCGLRGAL

SEQ ID NO: 6394 - protein, 8 aa, synthetic construct
EPEDFAFP

SEQ ID NO: 6395 - protein, 10 aa, synthetic construct
EPFFHGHDNY

SEQ ID NO: 6396 - protein, 10 aa, synthetic construct
EPFGEISSRY

SEQ ID NO: 6397 - protein, 9 aa, synthetic construct
EPFHLIVSY

SEQ ID NO: 6398 - protein, 9 aa, synthetic construct
EPFNFQMVY

SEQ ID NO: 6399 - protein, 10 aa, synthetic construct
EPFSEEATLF

SEQ ID NO: 6400 - protein, 9 aa, synthetic construct
EPFSSPPEL

SEQ ID NO: 6401 - protein, 9 aa, synthetic construct
EPIPFSSSM

SEQ ID NO: 6402 - protein, 9 aa, synthetic construct
EPIYIITEY

SEQ ID NO: 6403 - protein, 9 aa, synthetic construct
EPIYIVTEY

SEQ ID NO: 6404 - protein, 11 aa, synthetic construct
EPIYPEVVHMF

SEQ ID NO: 6405 - protein, 9 aa, synthetic construct
EPKLKYERL

SEQ ID NO: 6406 - protein, 9 aa, synthetic construct
EPLAIVEGY

SEQ ID NO: 6407 - protein, 9 aa, synthetic construct
EPLKKLENL

SEQ ID NO: 6408 - protein, 9 aa, synthetic construct
EPLNASEAF

SEQ ID NO: 6409 - protein, 9 aa, synthetic construct
EPLRPGPAL

SEQ ID NO: 6410 - protein, 9 aa, synthetic construct
EPLSQITAY

SEQ ID NO: 6411 - protein, 9 aa, synthetic construct
EPLTLEQEY

SEQ ID NO: 6412 - protein, 8 aa, synthetic construct
EPLVRQVL

SEQ ID NO: 6413 - protein, 9 aa, synthetic construct
EPNPDDPLM

SEQ ID NO: 6414 - protein, 9 aa, synthetic construct
EPNPRVIEL

SEQ ID NO: 6415 - protein, 9 aa, synthetic construct
EPQAKNISV

SEQ ID NO: 6416 - protein, 9 aa, synthetic construct
EPQHWPVQY

SEQ ID NO: 6417 - protein, 10 aa, synthetic construct
EPRDGPPSAL

SEQ ID NO: 6418 - protein, 9 aa, synthetic construct
EPRFVLRAL

SEQ ID NO: 6419 - protein, 9 aa, synthetic construct
EPRPFDPQY

SEQ ID NO: 6420 - protein, 9 aa, synthetic construct
EPRPGAGSL

SEQ ID NO: 6421 - protein, 9 aa, synthetic construct
EPRPTGMSL

SEQ ID NO: 6422 - protein, 9 aa, synthetic construct
EPSPDFPAL

SEQ ID NO: 6423 - protein, 9 aa, synthetic construct
EPSPPTPSF

SEQ ID NO: 6424 - protein, 9 aa, synthetic construct
EPTAAALAY

SEQ ID NO: 6425 - protein, 11 aa, synthetic construct
EPVEVLPNVNY

SEQ ID NO: 6426 - protein, 9 aa, synthetic construct
EPWIKLPIY

SEQ ID NO: 6427 - protein, 10 aa, synthetic construct
EPWPENATLY

SEQ ID NO: 6428 - protein, 9 aa, synthetic construct
EPYNEVCQY

SEQ ID NO: 6429 - protein, 10 aa, synthetic construct
EPYPDDGMGY

SEQ ID NO: 6430 - protein, 10 aa, synthetic construct
EPMEDSGISL

SEQ ID NO: 6431 - protein, 11 aa, synthetic construct
EPMSIDCGHSF

SEQ ID NO: 6432 - protein, 10 aa, synthetic construct
EQESFIDYKS

SEQ ID NO: 6433 - protein, 8 aa, synthetic construct
EQFILSQV

SEQ ID NO: 6434 - protein, 9 aa, synthetic construct
EQFKFKNMV

SEQ ID NO: 6435 - protein, 9 aa, synthetic construct
EQIELHNSI

SEQ ID NO: 6436 - protein, 8 aa, synthetic construct
EQIRLKNI

SEQ ID NO: 6437 - protein, 9 aa, synthetic construct
EQKLKLERL

SEQ ID NO: 6438 - protein, 8 aa, synthetic construct
EQKLRFAF

SEQ ID NO: 6439 - protein, 10 aa, synthetic construct
EQQNQVLQTK

SEQ ID NO: 6440 - protein, 9 aa, synthetic construct
EQRQFVTCI

SEQ ID NO: 6441 - protein, 8 aa, synthetic construct
EQVDLYQF

SEQ ID NO: 6442 - protein, 8 aa, synthetic construct
EQVSTPEI

SEQ ID NO: 6443 - protein, 8 aa, synthetic construct
EQWQTMEI

SEQ ID NO: 6444 - protein, 9 aa, synthetic construct
EQYEFCYKV

SEQ ID NO: 6445 - protein, 9 aa, synthetic construct
EQYGKIEVI

SEQ ID NO: 6446 - protein, 8 aa, synthetic construct
EQYPGIEI

SEQ ID NO: 6447 - protein, 9 aa, synthetic construct
EQYRQVISV

SEQ ID NO: 6448 - protein, 8 aa, synthetic construct
EQYYVRKV

SEQ ID NO: 6449 - protein, 9 aa, synthetic construct
ERADLIAYL

SEQ ID NO: 6450 - protein, 9 aa, synthetic construct
ERAYILNLV

SEQ ID NO: 6451 - protein, 9 aa, synthetic construct
ERFPNNLPK

SEQ ID NO: 6452 - protein, 9 aa, synthetic construct
ERIEKLWKR

SEQ ID NO: 6453 - protein, 9 aa, synthetic construct
ERLELLLQK

SEQ ID NO: 6454 - protein, 9 aa, synthetic construct
ESADFCNKY

SEQ ID NO: 6455 - protein, 10 aa, synthetic construct
ESCPSTSSFY

SEQ ID NO: 6456 - protein, 9 aa, synthetic construct
ESDEVELSY

SEQ ID NO: 6457 - protein, 10 aa, synthetic construct
ESDGKSRWFY

SEQ ID NO: 6458 - protein, 9 aa, synthetic construct
ESDINSVRY

SEQ ID NO: 6459 - protein, 9 aa, synthetic construct
ESDPIVAQY

SEQ ID NO: 6460 - protein, 9 aa, synthetic construct
ESDSTIVYY

SEQ ID NO: 6461 - protein, 10 aa, synthetic construct
ESEDKPEIED

SEQ ID NO: 6462 - protein, 10 aa, synthetic construct
ESENVVCHFY

SEQ ID NO: 6463 - protein, 9 aa, synthetic construct
ESEYGNITY

SEQ ID NO: 6464 - protein, 10 aa, synthetic construct
ESFPSSVAGY

SEQ ID NO: 6465 - protein, 9 aa, synthetic construct
ESINHVVVF

SEQ ID NO: 6466 - protein, 10 aa, synthetic construct
ESIWEILHRY

SEQ ID NO: 6467 - protein, 9 aa, synthetic construct
ESKSKLIAL

SEQ ID NO: 6468 - protein, 9 aa, synthetic construct
ESLGYVLMY

SEQ ID NO: 6469 - protein, 9 aa, synthetic construct
ESLHFVIEM

SEQ ID NO: 6470 - protein, 11 aa, synthetic construct
ESSAGGSFTVR

SEQ ID NO: 6471 - protein, 10 aa, synthetic construct
ESSEQTFMYY

SEQ ID NO: 6472 - protein, 9 aa, synthetic construct
ESSSVVLRY

SEQ ID NO: 6473 - protein, 8 aa, synthetic construct
ESVDNEGE

SEQ ID NO: 6474 - protein, 11 aa, synthetic construct
ESVGKGAVHDV

SEQ ID NO: 6475 - protein, 11 aa, synthetic construct
ESVGKGGEERL

SEQ ID NO: 6476 - protein, 9 aa, synthetic construct
ETADVIAKV

SEQ ID NO: 6477 - protein, 9 aa, synthetic construct
ETAGRYITY

SEQ ID NO: 6478 - protein, 9 aa, synthetic construct
ETALLSSGF

SEQ ID NO: 6479 - protein, 10 aa, synthetic construct
ETAPGDISPY

SEQ ID NO: 6480 - protein, 9 aa, synthetic construct
ETATLRSGY

SEQ ID NO: 6481 - protein, 10 aa, synthetic construct
ETCCVIGNYY

SEQ ID NO: 6482 - protein, 10 aa, synthetic construct
ETCGDWYRGY

SEQ ID NO: 6483 - protein, 9 aa, synthetic construct
ETCPGLEQY

SEQ ID NO: 6484 - protein, 11 aa, synthetic construct
ETDEKDFYLYY

SEQ ID NO: 6485 - protein, 9 aa, synthetic construct
ETDSFKLAY

SEQ ID NO: 6486 - protein, 9 aa, synthetic construct
ETEDVNLAY

SEQ ID NO: 6487 - protein, 11 aa, synthetic construct
ETEEDKFLLLY

SEQ ID NO: 6488 - protein, 9 aa, synthetic construct
ETELDGLRY

SEQ ID NO: 6489 - protein, 9 aa, synthetic construct
ETEYSFLDY

SEQ ID NO: 6490 - protein, 10 aa, synthetic construct
ETFDYIGSSR

SEQ ID NO: 6491 - protein, 9 aa, synthetic construct
ETFEKSRLY

SEQ ID NO: 6492 - protein, 9 aa, synthetic construct
ETFKLAQTY

SEQ ID NO: 6493 - protein, 9 aa, synthetic construct
ETFNTPAMY

SEQ ID NO: 6494 - protein, 9 aa, synthetic construct
ETFTGTLQY

SEQ ID NO: 6495 - protein, 9 aa, synthetic construct
ETICLLLAY

SEQ ID NO: 6496 - protein, 10 aa, synthetic construct
ETIDSRVQEY

SEQ ID NO: 6497 - protein, 10 aa, synthetic construct
ETIDTARLHY

SEQ ID NO: 6498 - protein, 9 aa, synthetic construct
ETIESINQL

SEQ ID NO: 6499 - protein, 10 aa, synthetic construct
ETIGEEISEM

SEQ ID NO: 6500 - protein, 9 aa, synthetic construct
ETIKCRTLF

SEQ ID NO: 6501 - protein, 9 aa, synthetic construct
ETIKDLPKM

SEQ ID NO: 6502 - protein, 9 aa, synthetic construct
ETINMCLQY

SEQ ID NO: 6503 - protein, 9 aa, synthetic construct
ETIQGTGSW

SEQ ID NO: 6504 - protein, 9 aa, synthetic construct
ETIQITQKY

SEQ ID NO: 6505 - protein, 9 aa, synthetic construct
ETIRNIDCY

SEQ ID NO: 6506 - protein, 9 aa, synthetic construct
ETIRNIPHL

SEQ ID NO: 6507 - protein, 9 aa, synthetic construct
ETISLIIHY

SEQ ID NO: 6508 - protein, 10 aa, synthetic construct
ETITGLLQEF

SEQ ID NO: 6509 - protein, 11 aa, synthetic construct
ETIVLKEGSEY

SEQ ID NO: 6510 - protein, 9 aa, synthetic construct
ETIVNVLDF

SEQ ID NO: 6511 - protein, 10 aa, synthetic construct
ETIYDLGTKM

SEQ ID NO: 6512 - protein, 11 aa, synthetic construct
ETLKLSMSLQV

SEQ ID NO: 6513 - protein, 9 aa, synthetic construct
ETNADVYYY

SEQ ID NO: 6514 - protein, 9 aa, synthetic construct
ETPDNILEV

SEQ ID NO: 6515 - protein, 9 aa, synthetic construct
ETPEMLPAY

SEQ ID NO: 6516 - protein, 9 aa, synthetic construct
ETRDFIDAY

SEQ ID NO: 6517 - protein, 11 aa, synthetic construct
ETTCPVCLQYF

SEQ ID NO: 6518 - protein, 11 aa, synthetic construct
ETTEESLRNYY

SEQ ID NO: 6519 - protein, 10 aa, synthetic construct
ETTGIVSMVY

SEQ ID NO: 6520 - protein, 9 aa, synthetic construct
ETTRLVTSL

SEQ ID NO: 6521 - protein, 11 aa, synthetic construct
ETTSHLMGMFY

SEQ ID NO: 6522 - protein, 9 aa, synthetic construct
ETTVLVESY

SEQ ID NO: 6523 - protein, 11 aa, synthetic construct
ETVGEEDIRLF

SEQ ID NO: 6524 - protein, 10 aa, synthetic construct
ETVKSILAEY

SEQ ID NO: 6525 - protein, 9 aa, synthetic construct
ETVNRIKLY

SEQ ID NO: 6526 - protein, 9 aa, synthetic construct
ETVNVITLY

SEQ ID NO: 6527 - protein, 8 aa, synthetic construct
ETVSFSPD

SEQ ID NO: 6528 - protein, 9 aa, synthetic construct
ETVYELTKM

SEQ ID NO: 6529 - protein, 10 aa, synthetic construct
ETYPNYLPLY

SEQ ID NO: 6530 - protein, 9 aa, synthetic construct
ETYQFSGVY

SEQ ID NO: 6531 - protein, 9 aa, synthetic construct
ETMHTLLDY

SEQ ID NO: 6532 - protein, 11 aa, synthetic construct
ETMHTLLDYTY

SEQ ID NO: 6533 - protein, 10 aa, synthetic construct
EVAAPDVGRM

SEQ ID NO: 6534 - protein, 9 aa, synthetic construct
EVAAVLLHF

SEQ ID NO: 6535 - protein, 10 aa, synthetic construct
EVADGLCCVL

SEQ ID NO: 6536 - protein, 11 aa, synthetic construct
EVADGTAVDIF

SEQ ID NO: 6537 - protein, 10 aa, synthetic construct
EVADLELQRV

SEQ ID NO: 6538 - protein, 10 aa, synthetic construct
EVADRLFSSF

SEQ ID NO: 6539 - protein, 10 aa, synthetic construct
EVADVLVDGY

SEQ ID NO: 6540 - protein, 9 aa, synthetic construct
EVADWSEGV

SEQ ID NO: 6541 - protein, 9 aa, synthetic construct
EVAEFLARH

SEQ ID NO: 6542 - protein, 9 aa, synthetic construct
EVAEHVQYM

SEQ ID NO: 6543 - protein, 10 aa, synthetic construct
EVAEVKISHF

SEQ ID NO: 6544 - protein, 9 aa, synthetic construct
EVAEYGTCY

SEQ ID NO: 6545 - protein, 9 aa, synthetic construct
EVAEYLLQH

SEQ ID NO: 6546 - protein, 9 aa, synthetic construct
EVAIRLLYM

SEQ ID NO: 6547 - protein, 9 aa, synthetic construct
EVAKKLCSF

SEQ ID NO: 6548 - protein, 9 aa, synthetic construct
EVAKVIVSM

SEQ ID NO: 6549 - protein, 9 aa, synthetic construct
EVAPAGASY

SEQ ID NO: 6550 - protein, 11 aa, synthetic construct
EVAPGYVVTVL

SEQ ID NO: 6551 - protein, 9 aa, synthetic construct
EVAPRLAFA

SEQ ID NO: 6552 - protein, 10 aa, synthetic construct
EVAPVISSAY

SEQ ID NO: 6553 - protein, 9 aa, synthetic construct
EVAPMLQQF

SEQ ID NO: 6554 - protein, 10 aa, synthetic construct
EVAQVESLRY

SEQ ID NO: 6555 - protein, 9 aa, synthetic construct
EVASNVPKV

SEQ ID NO: 6556 - protein, 11 aa, synthetic construct
EVATELPCHHY

SEQ ID NO: 6557 - protein, 9 aa, synthetic construct
EVATFYTMY

SEQ ID NO: 6558 - protein, 9 aa, synthetic construct
EVATRMQSF

SEQ ID NO: 6559 - protein, 9 aa, synthetic construct
EVAVHLILY

SEQ ID NO: 6560 - protein, 9 aa, synthetic construct
EVCCTSIVY

SEQ ID NO: 6561 - protein, 9 aa, synthetic construct
EVCGTSWTY

SEQ ID NO: 6562 - protein, 10 aa, synthetic construct
EVCQSYKSLY

SEQ ID NO: 6563 - protein, 9 aa, synthetic construct
EVCRIFYDM

SEQ ID NO: 6564 - protein, 9 aa, synthetic construct
EVCSAYLGL

SEQ ID NO: 6565 - protein, 10 aa, synthetic construct
EVCSCPDLRF

SEQ ID NO: 6566 - protein, 10 aa, synthetic construct
EVCSTCVQDF

SEQ ID NO: 6567 - protein, 11 aa, synthetic construct
EVDETYVPKEF

SEQ ID NO: 6568 - protein, 8 aa, synthetic construct
EVDMPVFF

SEQ ID NO: 6569 - protein, 8 aa, synthetic construct
EVEHPAAK

SEQ ID NO: 6570 - protein, 10 aa, synthetic construct
EVFHDQLHTF

SEQ ID NO: 6571 - protein, 10 aa, synthetic construct
EVFMHVSTAY

SEQ ID NO: 6572 - protein, 9 aa, synthetic construct
EVFNNIIQY

SEQ ID NO: 6573 - protein, 9 aa, synthetic construct
EVFPLAMNY

SEQ ID NO: 6574 - protein, 10 aa, synthetic construct
EVFPLAMNYL

SEQ ID NO: 6575 - protein, 10 aa, synthetic construct
EVFPLKVFGY

SEQ ID NO: 6576 - protein, 10 aa, synthetic construct
EVFRFASACM

SEQ ID NO: 6577 - protein, 9 aa, synthetic construct
EVFRLSLKK

SEQ ID NO: 6578 - protein, 10 aa, synthetic construct
EVFTELQEKY

SEQ ID NO: 6579 - protein, 10 aa, synthetic construct
EVFTGGIGSY

SEQ ID NO: 6580 - protein, 10 aa, synthetic construct
EVFTGHMGKL

SEQ ID NO: 6581 - protein, 9 aa, synthetic construct
EVGPAGSQF

SEQ ID NO: 6582 - protein, 11 aa, synthetic construct
EVHEHDGHLYL

SEQ ID NO: 6583 - protein, 10 aa, synthetic construct
EVHRFGITGY

SEQ ID NO: 6584 - protein, 9 aa, synthetic construct
EVIDFSHGL

SEQ ID NO: 6585 - protein, 11 aa, synthetic construct
EVIDLDGNGLL

SEQ ID NO: 6586 - protein, 10 aa, synthetic construct
EVIDLMIKEY

SEQ ID NO: 6587 - protein, 9 aa, synthetic construct
EVIDRVTDL

SEQ ID NO: 6588 - protein, 10 aa, synthetic construct
EVIDTQTKLY

SEQ ID NO: 6589 - protein, 9 aa, synthetic construct
EVIEKFDYV

SEQ ID NO: 6590 - protein, 9 aa, synthetic construct
EVIEKLFAM

SEQ ID NO: 6591 - protein, 9 aa, synthetic construct
EVIEQIENL

SEQ ID NO: 6592 - protein, 10 aa, synthetic construct
EVIETEKTLY

SEQ ID NO: 6593 - protein, 9 aa, synthetic construct
EVIETLLSL

SEQ ID NO: 6594 - protein, 9 aa, synthetic construct
EVIFSLETY

SEQ ID NO: 6595 - protein, 11 aa, synthetic construct
EVIGMHAAMKY

SEQ ID NO: 6596 - protein, 9 aa, synthetic construct
EVIGRVPQA

SEQ ID NO: 6597 - protein, 9 aa, synthetic construct
EVIKELAQI

SEQ ID NO: 6598 - protein, 9 aa, synthetic construct
EVIKNFIQY

SEQ ID NO: 6599 - protein, 9 aa, synthetic construct
EVILIVPFY

SEQ ID NO: 6600 - protein, 9 aa, synthetic construct
EVINDYHFR

SEQ ID NO: 6601 - protein, 9 aa, synthetic construct
EVIPALPRL

SEQ ID NO: 6602 - protein, 9 aa, synthetic construct
EVIPNSNFY

SEQ ID NO: 6603 - protein, 9 aa, synthetic construct
EVIPPYYSY

SEQ ID NO: 6604 - protein, 9 aa, synthetic construct
EVIQNMTEF

SEQ ID NO: 6605 - protein, 9 aa, synthetic construct
EVIRQAGVY

SEQ ID NO: 6606 - protein, 10 aa, synthetic construct
EVISDEHGID

SEQ ID NO: 6607 - protein, 9 aa, synthetic construct
EVISHIGKL

SEQ ID NO: 6608 - protein, 9 aa, synthetic construct
EVISKLYAV

SEQ ID NO: 6609 - protein, 9 aa, synthetic construct
EVISSLEKY

SEQ ID NO: 6610 - protein, 9 aa, synthetic construct
EVISTLHYF

SEQ ID NO: 6611 - protein, 9 aa, synthetic construct
EVISVLQKY

SEQ ID NO: 6612 - protein, 9 aa, synthetic construct
EVITRQKQL

SEQ ID NO: 6613 - protein, 9 aa, synthetic construct
EVKKEVAFF

SEQ ID NO: 6614 - protein, 9 aa, synthetic construct
EVKLKVDSF

SEQ ID NO: 6615 - protein, 9 aa, synthetic construct
EVKPHALEL

SEQ ID NO: 6616 - protein, 9 aa, synthetic construct
EVKQKLQEF

SEQ ID NO: 6617 - protein, 9 aa, synthetic construct
EVKTKLFSL

SEQ ID NO: 6618 - protein, 10 aa, synthetic construct
EVLAGHGHLY

SEQ ID NO: 6619 - protein, 10 aa, synthetic construct
EVLDGAVMMY

SEQ ID NO: 6620 - protein, 10 aa, synthetic construct
EVLEGSNAYY

SEQ ID NO: 6621 - protein, 9 aa, synthetic construct
EVLHWVTHF

SEQ ID NO: 6622 - protein, 9 aa, synthetic construct
EVLKRATVA

SEQ ID NO: 6623 - protein, 9 aa, synthetic construct
EVLNFLLRY

SEQ ID NO: 6624 - protein, 10 aa, synthetic construct
EVLPHVPLGV

SEQ ID NO: 6625 - protein, 9 aa, synthetic construct
EVLQRGEAL

SEQ ID NO: 6626 - protein, 9 aa, synthetic construct
EVMTKLSHF

SEQ ID NO: 6627 - protein, 9 aa, synthetic construct
EVNEWFTKY

SEQ ID NO: 6628 - protein, 9 aa, synthetic construct
EVPDYSMAY

SEQ ID NO: 6629 - protein, 9 aa, synthetic construct
EVPVLNVSY

SEQ ID NO: 6630 - protein, 9 aa, synthetic construct
EVQDSYEAY

SEQ ID NO: 6631 - protein, 9 aa, synthetic construct
EVRAIFTGY

SEQ ID NO: 6632 - protein, 10 aa, synthetic construct
EVRDFSAMAF

SEQ ID NO: 6633 - protein, 9 aa, synthetic construct
EVSAALFLY

SEQ ID NO: 6634 - protein, 9 aa, synthetic construct
EVSEQILHM

SEQ ID NO: 6635 - protein, 9 aa, synthetic construct
EVSPIFTQF

SEQ ID NO: 6636 - protein, 9 aa, synthetic construct
EVSPYCLLF

SEQ ID NO: 6637 - protein, 9 aa, synthetic construct
EVSSHFSHF

SEQ ID NO: 6638 - protein, 9 aa, synthetic construct
EVSTEVPEM

SEQ ID NO: 6639 - protein, 9 aa, synthetic construct
EVSTLVSKY

SEQ ID NO: 6640 - protein, 9 aa, synthetic construct
EVTAIIASF

SEQ ID NO: 6641 - protein, 9 aa, synthetic construct
EVTAVVLLY

SEQ ID NO: 6642 - protein, 9 aa, synthetic construct
EVTCEISRY

SEQ ID NO: 6643 - protein, 9 aa, synthetic construct
EVTDFLSFY

SEQ ID NO: 6644 - protein, 9 aa, synthetic construct
EVTDLLASF

SEQ ID NO: 6645 - protein, 9 aa, synthetic construct
EVTEFGNKY

SEQ ID NO: 6646 - protein, 9 aa, synthetic construct
EVTELLARY

SEQ ID NO: 6647 - protein, 11 aa, synthetic construct
EVTPNSLSTSY

SEQ ID NO: 6648 - protein, 9 aa, synthetic construct
EVTSVTSWM

SEQ ID NO: 6649 - protein, 9 aa, synthetic construct
EVVAEVQEF

SEQ ID NO: 6650 - protein, 9 aa, synthetic construct
EVVAGIKEY

SEQ ID NO: 6651 - protein, 10 aa, synthetic construct
EVVAGIKEYF

SEQ ID NO: 6652 - protein, 10 aa, synthetic construct
EVVAVAHAVY

SEQ ID NO: 6653 - protein, 9 aa, synthetic construct
EVVDEIELL

SEQ ID NO: 6654 - protein, 9 aa, synthetic construct
EVVDKINQV

SEQ ID NO: 6655 - protein, 10 aa, synthetic construct
EVVDKKIEEF

SEQ ID NO: 6656 - protein, 9 aa, synthetic construct
EVVDLFRAY

SEQ ID NO: 6657 - protein, 9 aa, synthetic construct
EVVDLYNGM

SEQ ID NO: 6658 - protein, 9 aa, synthetic construct
EVVEEVEKY

SEQ ID NO: 6659 - protein, 9 aa, synthetic construct
EVVERVLTF

SEQ ID NO: 6660 - protein, 10 aa, synthetic construct
EVVGEQVTSY

SEQ ID NO: 6661 - protein, 11 aa, synthetic construct
EVVGPEGMEKF

SEQ ID NO: 6662 - protein, 9 aa, synthetic construct
EVVGYFGRF

SEQ ID NO: 6663 - protein, 9 aa, synthetic construct
EVVHLILFY

SEQ ID NO: 6664 - protein, 9 aa, synthetic construct
EVVNLFLHF

SEQ ID NO: 6665 - protein, 10 aa, synthetic construct
EVVSEPFRSF

SEQ ID NO: 6666 - protein, 9 aa, synthetic construct
EVVSNVQEY

SEQ ID NO: 6667 - protein, 9 aa, synthetic construct
EVVVQVPYL

SEQ ID NO: 6668 - protein, 9 aa, synthetic construct
EVYAGSHQY

SEQ ID NO: 6669 - protein, 9 aa, synthetic construct
EVYDDFLHY

SEQ ID NO: 6670 - protein, 10 aa, synthetic construct
EVYEGVWKKY

SEQ ID NO: 6671 - protein, 10 aa, synthetic construct
EVYEGVYTNH

SEQ ID NO: 6672 - protein, 10 aa, synthetic construct
EVYPFGIVGM

SEQ ID NO: 6673 - protein, 9 aa, synthetic construct
EVYQHLAHY

SEQ ID NO: 6674 - protein, 11 aa, synthetic construct
EVYTEEDAASY

SEQ ID NO: 6675 - protein, 10 aa, synthetic construct
EVYYGQYISF

SEQ ID NO: 6676 - protein, 10 aa, synthetic construct
EVMASTVVKY

SEQ ID NO: 6677 - protein, 10 aa, synthetic construct
EVMNQNLAYY

SEQ ID NO: 6678 - protein, 10 aa, synthetic construct
EVMPDLYFYR

SEQ ID NO: 6679 - protein, 9 aa, synthetic construct
EVMPLLLAY

SEQ ID NO: 6680 - protein, 9 aa, synthetic construct
EVMSLMSSL

SEQ ID NO: 6681 - protein, 8 aa, synthetic construct
EYGFQVKV

SEQ ID NO: 6682 - protein, 9 aa, synthetic construct
EYGSIIAFF

SEQ ID NO: 6683 - protein, 8 aa, synthetic construct
EYHAETIK

SEQ ID NO: 6684 - protein, 9 aa, synthetic construct
EYIRSLNQF

SEQ ID NO: 6685 - protein, 9 aa, synthetic construct
EYLGKLVRF

SEQ ID NO: 6686 - protein, 9 aa, synthetic construct
EYLKLLHSF

SEQ ID NO: 6687 - protein, 10 aa, synthetic construct
EYLKNVLLQF

SEQ ID NO: 6688 - protein, 10 aa, synthetic construct
EYLTAEILEL

SEQ ID NO: 6689 - protein, 9 aa, synthetic construct
EYLTKVDKL

SEQ ID NO: 6690 - protein, 10 aa, synthetic construct
EYPDRIMNTF

SEQ ID NO: 6691 - protein, 9 aa, synthetic construct
EYTDVYPEI

SEQ ID NO: 6692 - protein, 11 aa, synthetic construct
EYVDDTQFLRF

SEQ ID NO: 6693 - protein, 9 aa, synthetic construct
EYVEKFYRI

SEQ ID NO: 6694 - protein, 8 aa, synthetic construct
EMILKVVM

SEQ ID NO: 6695 - protein, 9 aa, synthetic construct
EMKSRILVI

SEQ ID NO: 6696 - protein, 8 aa, synthetic construct
EMLIRVNM

SEQ ID NO: 6697 - protein, 8 aa, synthetic construct
EMLTVSSI

SEQ ID NO: 6698 - protein, 8 aa, synthetic construct
ENGDAKTD

SEQ ID NO: 6699 - protein, 9 aa, synthetic construct
FAADIISVL

SEQ ID NO: 6700 - protein, 9 aa, synthetic construct
FAAGYNVKF

SEQ ID NO: 6701 - protein, 9 aa, synthetic construct
FAALEKTYY

SEQ ID NO: 6702 - protein, 9 aa, synthetic construct
FADDMYSLY

SEQ ID NO: 6703 - protein, 9 aa, synthetic construct
FADLNLAEF

SEQ ID NO: 6704 - protein, 9 aa, synthetic construct
FADTLLIVF

SEQ ID NO: 6705 - protein, 9 aa, synthetic construct
FAEAHYLSY

SEQ ID NO: 6706 - protein, 9 aa, synthetic construct
FAEMIQPEY

SEQ ID NO: 6707 - protein, 9 aa, synthetic construct
FAFEHSEEY

SEQ ID NO: 6708 - protein, 9 aa, synthetic construct
FAFLTGVGL

SEQ ID NO: 6709 - protein, 10 aa, synthetic construct
FAFVEFEDPR

SEQ ID NO: 6710 - protein, 8 aa, synthetic construct
FAGKQLED

SEQ ID NO: 6711 - protein, 10 aa, synthetic construct
FAGKQLEDGR

SEQ ID NO: 6712 - protein, 11 aa, synthetic construct
FAIFMGLRASK

SEQ ID NO: 6713 - protein, 10 aa, synthetic construct
FAIGGSGSSY

SEQ ID NO: 6714 - protein, 10 aa, synthetic construct
FAIGGSGSTF

SEQ ID NO: 6715 - protein, 9 aa, synthetic construct
FAIPGSIFL

SEQ ID NO: 6716 - protein, 9 aa, synthetic construct
FAISILQQL

SEQ ID NO: 6717 - protein, 9 aa, synthetic construct
FAKKLLISL

SEQ ID NO: 6718 - protein, 8 aa, synthetic construct
FAKNMYEL

SEQ ID NO: 6719 - protein, 9 aa, synthetic construct
FAKRQLVTL

SEQ ID NO: 6720 - protein, 11 aa, synthetic construct
FALTNGIYPHK

SEQ ID NO: 6721 - protein, 9 aa, synthetic construct
FAMIVSSAL

SEQ ID NO: 6722 - protein, 9 aa, synthetic construct
FANIDQETY

SEQ ID NO: 6723 - protein, 9 aa, synthetic construct
FANLPNQVY

SEQ ID NO: 6724 - protein, 9 aa, synthetic construct
FAPEEISAM

SEQ ID NO: 6725 - protein, 9 aa, synthetic construct
FAPNHVVAK

SEQ ID NO: 6726 - protein, 9 aa, synthetic construct
FAPPNTSDM

SEQ ID NO: 6727 - protein, 9 aa, synthetic construct
FAPSPTGFL

SEQ ID NO: 6728 - protein, 8 aa, synthetic construct
FAPYGTVM

SEQ ID NO: 6729 - protein, 9 aa, synthetic construct
FAPYNKPSL

SEQ ID NO: 6730 - protein, 9 aa, synthetic construct
FARLPEEEF

SEQ ID NO: 6731 - protein, 9 aa, synthetic construct
FARPGDVEF

SEQ ID NO: 6732 - protein, 9 aa, synthetic construct
FASGLIHRV

SEQ ID NO: 6733 - protein, 11 aa, synthetic construct
FASKEIAENAL

SEQ ID NO: 6734 - protein, 9 aa, synthetic construct
FASLVSQDY

SEQ ID NO: 6735 - protein, 9 aa, synthetic construct
FATPPSSTY

SEQ ID NO: 6736 - protein, 9 aa, synthetic construct
FAVAFGSFF

SEQ ID NO: 6737 - protein, 10 aa, synthetic construct
FAWAHDSSEY

SEQ ID NO: 6738 - protein, 9 aa, synthetic construct
FCHEPCRPL

SEQ ID NO: 6739 - protein, 9 aa, synthetic construct
FCMDRALEF

SEQ ID NO: 6740 - protein, 9 aa, synthetic construct
FCPFASSQV

SEQ ID NO: 6741 - protein, 8 aa, synthetic construct
FDKTLAEL

SEQ ID NO: 6742 - protein, 10 aa, synthetic construct
FDSGLHPAVK

SEQ ID NO: 6743 - protein, 9 aa, synthetic construct
FDVHDVTLH

SEQ ID NO: 6744 - protein, 8 aa, synthetic construct
FDVSHEHL

SEQ ID NO: 6745 - protein, 9 aa, synthetic construct
FEADPPGQV

SEQ ID NO: 6746 - protein, 10 aa, synthetic construct
FEAPATINSA

SEQ ID NO: 6747 - protein, 9 aa, synthetic construct
FEARFFHLA

SEQ ID NO: 6748 - protein, 9 aa, synthetic construct
FEARIALLP

SEQ ID NO: 6749 - protein, 9 aa, synthetic construct
FEDAAEIRL

SEQ ID NO: 6750 - protein, 9 aa, synthetic construct
FEFDIFTRL

SEQ ID NO: 6751 - protein, 9 aa, synthetic construct
FEFEYQTKV

SEQ ID NO: 6752 - protein, 9 aa, synthetic construct
FEFKDMRVP

SEQ ID NO: 6753 - protein, 9 aa, synthetic construct
FEFPNKVVL

SEQ ID NO: 6754 - protein, 9 aa, synthetic construct
FEFTDFTLP

SEQ ID NO: 6755 - protein, 9 aa, synthetic construct
FEGGVVIAA

SEQ ID NO: 6756 - protein, 9 aa, synthetic construct
FEITPPVVL

SEQ ID NO: 6757 - protein, 10 aa, synthetic construct
FEKDFKEVFA

SEQ ID NO: 6758 - protein, 9 aa, synthetic construct
FELEKHSAP

SEQ ID NO: 6759 - protein, 10 aa, synthetic construct
FELMTSLHTK

SEQ ID NO: 6760 - protein, 11 aa, synthetic construct
FESFGDLSTPD

SEQ ID NO: 6761 - protein, 9 aa, synthetic construct
FESQDTVAL

SEQ ID NO: 6762 - protein, 11 aa, synthetic construct
FESSGAGKIGL

SEQ ID NO: 6763 - protein, 9 aa, synthetic construct
FETKITQVL

SEQ ID NO: 6764 - protein, 11 aa, synthetic construct
FEVSITDLVQN

SEQ ID NO: 6765 - protein, 10 aa, synthetic construct
FEVTGQETVA

SEQ ID NO: 6766 - protein, 9 aa, synthetic construct
FEWENKVTV

SEQ ID NO: 6767 - protein, 9 aa, synthetic construct
FEYDGKINA

SEQ ID NO: 6768 - protein, 9 aa, synthetic construct
FEYDTPRMV

SEQ ID NO: 6769 - protein, 8 aa, synthetic construct
FEYIEENK

SEQ ID NO: 6770 - protein, 8 aa, synthetic construct
FEYILSHV

SEQ ID NO: 6771 - protein, 11 aa, synthetic construct
FEMATRAALQA

SEQ ID NO: 6772 - protein, 9 aa, synthetic construct
FEMITKEEL

SEQ ID NO: 6773 - protein, 10 aa, synthetic construct
FFDAGAAEFL

SEQ ID NO: 6774 - protein, 9 aa, synthetic construct
FFDDLSDSF

SEQ ID NO: 6775 - protein, 8 aa, synthetic construct
FFDDPMLL

SEQ ID NO: 6776 - protein, 10 aa, synthetic construct
FFDDVGAVTL

SEQ ID NO: 6777 - protein, 9 aa, synthetic construct
FFDEESYSL

SEQ ID NO: 6778 - protein, 9 aa, synthetic construct
FFDEVVKQM

SEQ ID NO: 6779 - protein, 8 aa, synthetic construct
FFDHSGTL

SEQ ID NO: 6780 - protein, 10 aa, synthetic construct
FFDHSGTLVM

SEQ ID NO: 6781 - protein, 10 aa, synthetic construct
FFDPSLLHLL

SEQ ID NO: 6782 - protein, 9 aa, synthetic construct
FFDSAMESY

SEQ ID NO: 6783 - protein, 8 aa, synthetic construct
FFEEFGKL

SEQ ID NO: 6784 - protein, 8 aa, synthetic construct
FFEICDEL

SEQ ID NO: 6785 - protein, 8 aa, synthetic construct
FFHSLSEK

SEQ ID NO: 6786 - protein, 11 aa, synthetic construct
FFLASLKSAMI

SEQ ID NO: 6787 - protein, 11 aa, synthetic construct
FFLEDAIAVTR

SEQ ID NO: 6788 - protein, 10 aa, synthetic construct
FFLEYLTNKT

SEQ ID NO: 6789 - protein, 11 aa, synthetic construct
FFLTAIFQAIA

SEQ ID NO: 6790 - protein, 10 aa, synthetic construct
FGAASVPSLK

SEQ ID NO: 6791 - protein, 11 aa, synthetic construct
FGAGGGFGSRS

SEQ ID NO: 6792 - protein, 9 aa, synthetic construct
FGFHKPKMY

SEQ ID NO: 6793 - protein, 9 aa, synthetic construct
FGGEFYSYY

SEQ ID NO: 6794 - protein, 8 aa, synthetic construct
FGGHIRSV

SEQ ID NO: 6795 - protein, 9 aa, synthetic construct
FGIDRPAEL

SEQ ID NO: 6796 - protein, 8 aa, synthetic construct
FGKEKFEV

SEQ ID NO: 6797 - protein, 9 aa, synthetic construct
FGKLRNIEL

SEQ ID NO: 6798 - protein, 9 aa, synthetic construct
FGLARAFSL

SEQ ID NO: 6799 - protein, 9 aa, synthetic construct
FGLARAKSV

SEQ ID NO: 6800 - protein, 8 aa, synthetic construct
FGLVRQGL

SEQ ID NO: 6801 - protein, 9 aa, synthetic construct
FGPGPGSNF

SEQ ID NO: 6802 - protein, 9 aa, synthetic construct
FGSDVVAQF

SEQ ID NO: 6803 - protein, 9 aa, synthetic construct
FGTNVMVTV

SEQ ID NO: 6804 - protein, 11 aa, synthetic construct
FGMVFGVIAMF

SEQ ID NO: 6805 - protein, 9 aa, synthetic construct
FHNTLEHLR

SEQ ID NO: 6806 - protein, 9 aa, synthetic construct
FIADHCPTL

SEQ ID NO: 6807 - protein, 11 aa, synthetic construct
FIAIKPDGVQR

SEQ ID NO: 6808 - protein, 9 aa, synthetic construct
FIDAQFEAY

SEQ ID NO: 6809 - protein, 9 aa, synthetic construct
FIDDANYSV

SEQ ID NO: 6810 - protein, 9 aa, synthetic construct
FIDSYFEIL

SEQ ID NO: 6811 - protein, 8 aa, synthetic construct
FIDTTSKF

SEQ ID NO: 6812 - protein, 8 aa, synthetic construct
FIFDTFQP

SEQ ID NO: 6813 - protein, 9 aa, synthetic construct
FIFQKVGKL

SEQ ID NO: 6814 - protein, 9 aa, synthetic construct
FIIYDTHSL

SEQ ID NO: 6815 - protein, 9 aa, synthetic construct
FIKDRILVY

SEQ ID NO: 6816 - protein, 8 aa, synthetic construct
FIKIKMAF

SEQ ID NO: 6817 - protein, 9 aa, synthetic construct
FIMDRAQAL

SEQ ID NO: 6818 - protein, 10 aa, synthetic construct
FIPESWLNSL

SEQ ID NO: 6819 - protein, 10 aa, synthetic construct
FIPVLTKKMN

SEQ ID NO: 6820 - protein, 10 aa, synthetic construct
FIQAGLLSAL

SEQ ID NO: 6821 - protein, 10 aa, synthetic construct
FIQNVPLEDR

SEQ ID NO: 6822 - protein, 9 aa, synthetic construct
FIRPKLVTI

SEQ ID NO: 6823 - protein, 9 aa, synthetic construct
FIRPVDPEY

SEQ ID NO: 6824 - protein, 9 aa, synthetic construct
FIRVVGSEF

SEQ ID NO: 6825 - protein, 9 aa, synthetic construct
FISGHTSEL

SEQ ID NO: 6826 - protein, 10 aa, synthetic construct
FIVDGAVVKF

SEQ ID NO: 6827 - protein, 9 aa, synthetic construct
FIVNTNVPR

SEQ ID NO: 6828 - protein, 9 aa, synthetic construct
FIWENIHTL

SEQ ID NO: 6829 - protein, 8 aa, synthetic construct
FIYNRVVL

SEQ ID NO: 6830 - protein, 9 aa, synthetic construct
FKAPITSEF

SEQ ID NO: 6831 - protein, 9 aa, synthetic construct
FKFPGRQKI

SEQ ID NO: 6832 - protein, 9 aa, synthetic construct
FKRYQVKFR

SEQ ID NO: 6833 - protein, 9 aa, synthetic construct
FLADPSAFV

SEQ ID NO: 6834 - protein, 11 aa, synthetic construct
FLADPSAFVAA

SEQ ID NO: 6835 - protein, 8 aa, synthetic construct
FLAEELWQ

SEQ ID NO: 6836 - protein, 10 aa, synthetic construct
FLAEHPNVTL

SEQ ID NO: 6837 - protein, 9 aa, synthetic construct
FLAGAVTSV

SEQ ID NO: 6838 - protein, 9 aa, synthetic construct
FLAPLFSSF

SEQ ID NO: 6839 - protein, 9 aa, synthetic construct
FLAQRAVEL

SEQ ID NO: 6840 - protein, 11 aa, synthetic construct
FLASESLIKQI

SEQ ID NO: 6841 - protein, 11 aa, synthetic construct
FLASFSTEGDK

SEQ ID NO: 6842 - protein, 9 aa, synthetic construct
FLCGVMKTY

SEQ ID NO: 6843 - protein, 11 aa, synthetic construct
FLDASGAKLDY

SEQ ID NO: 6844 - protein, 9 aa, synthetic construct
FLDDFESKY

SEQ ID NO: 6845 - protein, 9 aa, synthetic construct
FLDDVNLIL

SEQ ID NO: 6846 - protein, 9 aa, synthetic construct
FLDEKTHEL

SEQ ID NO: 6847 - protein, 9 aa, synthetic construct
FLDEPTTGL

SEQ ID NO: 6848 - protein, 10 aa, synthetic construct
FLDESRSTQY

SEQ ID NO: 6849 - protein, 9 aa, synthetic construct
FLDEYIFLA

SEQ ID NO: 6850 - protein, 9 aa, synthetic construct
FLDGNELTL

SEQ ID NO: 6851 - protein, 9 aa, synthetic construct
FLDHKTLYY

SEQ ID NO: 6852 - protein, 9 aa, synthetic construct
FLDITNPKA

SEQ ID NO: 6853 - protein, 9 aa, synthetic construct
FLDLGPPGI

SEQ ID NO: 6854 - protein, 9 aa, synthetic construct
FLDLTEQEF

SEQ ID NO: 6855 - protein, 9 aa, synthetic construct
FLDNLHINL

SEQ ID NO: 6856 - protein, 9 aa, synthetic construct
FLDNSLDTV

SEQ ID NO: 6857 - protein, 10 aa, synthetic construct
FLDPNNIPKA

SEQ ID NO: 6858 - protein, 10 aa, synthetic construct
FLDSDDHVKI

SEQ ID NO: 6859 - protein, 9 aa, synthetic construct
FLDSEVSEL

SEQ ID NO: 6860 - protein, 11 aa, synthetic construct
FLDSTGSRLDY

SEQ ID NO: 6861 - protein, 9 aa, synthetic construct
FLEEREIAL

SEQ ID NO: 6862 - protein, 9 aa, synthetic construct
FLEEVTEYY

SEQ ID NO: 6863 - protein, 9 aa, synthetic construct
FLEKLLPPV

SEQ ID NO: 6864 - protein, 9 aa, synthetic construct
FLFDGSPTY

SEQ ID NO: 6865 - protein, 9 aa, synthetic construct
FLFDRPMHV

SEQ ID NO: 6866 - protein, 9 aa, synthetic construct
FLFDTQHFI

SEQ ID NO: 6867 - protein, 9 aa, synthetic construct
FLFELPSRL

SEQ ID NO: 6868 - protein, 10 aa, synthetic construct
FLFEYDTPRM

SEQ ID NO: 6869 - protein, 9 aa, synthetic construct
FLFGGVLMT

SEQ ID NO: 6870 - protein, 8 aa, synthetic construct
FLFSTTKD

SEQ ID NO: 6871 - protein, 9 aa, synthetic construct
FLGTFILKV

SEQ ID NO: 6872 - protein, 10 aa, synthetic construct
FLHDGQEYTL

SEQ ID NO: 6873 - protein, 9 aa, synthetic construct
FLHDNMVEI

SEQ ID NO: 6874 - protein, 9 aa, synthetic construct
FLHEVLWEL

SEQ ID NO: 6875 - protein, 9 aa, synthetic construct
FLHIKETVL

SEQ ID NO: 6876 - protein, 9 aa, synthetic construct
FLINFIHTL

SEQ ID NO: 6877 - protein, 9 aa, synthetic construct
FLKDKFVEI

SEQ ID NO: 6878 - protein, 9 aa, synthetic construct
FLKIKPVSL

SEQ ID NO: 6879 - protein, 9 aa, synthetic construct
FLLALEPEL

SEQ ID NO: 6880 - protein, 10 aa, synthetic construct
FLLDGFPRTV

SEQ ID NO: 6881 - protein, 9 aa, synthetic construct
FLLDKALLI

SEQ ID NO: 6882 - protein, 9 aa, synthetic construct
FLLDKKIGV

SEQ ID NO: 6883 - protein, 9 aa, synthetic construct
FLLEGIRSL

SEQ ID NO: 6884 - protein, 9 aa, synthetic construct
FLLGEHLLL

SEQ ID NO: 6885 - protein, 10 aa, synthetic construct
FLLGPRLVLA

SEQ ID NO: 6886 - protein, 9 aa, synthetic construct
FLLPILSQI

SEQ ID NO: 6887 - protein, 9 aa, synthetic construct
FLLQDTVEL

SEQ ID NO: 6888 - protein, 9 aa, synthetic construct
FLLWATAEA

SEQ ID NO: 6889 - protein, 9 aa, synthetic construct
FLNDEVWNL

SEQ ID NO: 6890 - protein, 9 aa, synthetic construct
FLNNQEYVL

SEQ ID NO: 6891 - protein, 9 aa, synthetic construct
FLPEAFDFI

SEQ ID NO: 6892 - protein, 8 aa, synthetic construct
FLPEDEKR

SEQ ID NO: 6893 - protein, 9 aa, synthetic construct
FLPESVAVV

SEQ ID NO: 6894 - protein, 9 aa, synthetic construct
FLPQIEAAL

SEQ ID NO: 6895 - protein, 10 aa, synthetic construct
FLPRQPPMSL

SEQ ID NO: 6896 - protein, 9 aa, synthetic construct
FLPSEGSNL

SEQ ID NO: 6897 - protein, 9 aa, synthetic construct
FLQEHNTTL

SEQ ID NO: 6898 - protein, 9 aa, synthetic construct
FLQEKSPAV

SEQ ID NO: 6899 - protein, 9 aa, synthetic construct
FLQGDTSVL

SEQ ID NO: 6900 - protein, 9 aa, synthetic construct
FLQQKAQSL

SEQ ID NO: 6901 - protein, 9 aa, synthetic construct
FLRDKIASY

SEQ ID NO: 6902 - protein, 9 aa, synthetic construct
FLSELTQQL

SEQ ID NO: 6903 - protein, 9 aa, synthetic construct
FLSESVLAV

SEQ ID NO: 6904 - protein, 9 aa, synthetic construct
FLSGYYVTL

SEQ ID NO: 6905 - protein, 9 aa, synthetic construct
FLSTINVGL

SEQ ID NO: 6906 - protein, 9 aa, synthetic construct
FLTEFINYI

SEQ ID NO: 6907 - protein, 9 aa, synthetic construct
FLTGVTTEL

SEQ ID NO: 6908 - protein, 11 aa, synthetic construct
FLTPAKNAFFD

SEQ ID NO: 6909 - protein, 9 aa, synthetic construct
FLVDGVCTV

SEQ ID NO: 6910 - protein, 9 aa, synthetic construct
FLWCEVEKY

SEQ ID NO: 6911 - protein, 9 aa, synthetic construct
FLWDDSMAL

SEQ ID NO: 6912 - protein, 10 aa, synthetic construct
FLWDEGFHQL

SEQ ID NO: 6913 - protein, 9 aa, synthetic construct
FLWKEPATM

SEQ ID NO: 6914 - protein, 9 aa, synthetic construct
FLYAGHIFL

SEQ ID NO: 6915 - protein, 9 aa, synthetic construct
FLYDDNQRV

SEQ ID NO: 6916 - protein, 9 aa, synthetic construct
FLYPFPLAL

SEQ ID NO: 6917 - protein, 9 aa, synthetic construct
FLYSDEVQI

SEQ ID NO: 6918 - protein, 9 aa, synthetic construct
FLMPTSSEL

SEQ ID NO: 6919 - protein, 8 aa, synthetic construct
FNAPSHIR

SEQ ID NO: 6920 - protein, 9 aa, synthetic construct
FNCPIIEVY

SEQ ID NO: 6921 - protein, 9 aa, synthetic construct
FNEHWRQVY

SEQ ID NO: 6922 - protein, 10 aa, synthetic construct
FNSRKPITPE

SEQ ID NO: 6923 - protein, 9 aa, synthetic construct
FPAAPAPKM

SEQ ID NO: 6924 - protein, 9 aa, synthetic construct
FPAAPIPTL

SEQ ID NO: 6925 - protein, 9 aa, synthetic construct
FPAEDWAGL

SEQ ID NO: 6926 - protein, 10 aa, synthetic construct
FPAEGPDPEY

SEQ ID NO: 6927 - protein, 9 aa, synthetic construct
FPAEKESEW

SEQ ID NO: 6928 - protein, 10 aa, synthetic construct
FPAGIYDTKY

SEQ ID NO: 6929 - protein, 9 aa, synthetic construct
FPAGKVPAF

SEQ ID NO: 6930 - protein, 9 aa, synthetic construct
FPALAPLTY

SEQ ID NO: 6931 - protein, 9 aa, synthetic construct
FPALPGSSY

SEQ ID NO: 6932 - protein, 11 aa, synthetic construct
FPALQGAQTKM

SEQ ID NO: 6933 - protein, 9 aa, synthetic construct
FPANVMDVI

SEQ ID NO: 6934 - protein, 9 aa, synthetic construct
FPAPILRAV

SEQ ID NO: 6935 - protein, 10 aa, synthetic construct
FPASFPNRQY

SEQ ID NO: 6936 - protein, 9 aa, synthetic construct
FPASPPKGY

SEQ ID NO: 6937 - protein, 9 aa, synthetic construct
FPATPLLDY

SEQ ID NO: 6938 - protein, 9 aa, synthetic construct
FPAVGMHSL

SEQ ID NO: 6939 - protein, 9 aa, synthetic construct
FPDETHERY

SEQ ID NO: 6940 - protein, 11 aa, synthetic construct
FPDFPTPGVVF

SEQ ID NO: 6941 - protein, 11 aa, synthetic construct
FPDPAGKLNQF

SEQ ID NO: 6942 - protein, 10 aa, synthetic construct
FPDPNVKYVF

SEQ ID NO: 6943 - protein, 10 aa, synthetic construct
FPDSPGGTSY

SEQ ID NO: 6944 - protein, 10 aa, synthetic construct
FPEADKVRTM

SEQ ID NO: 6945 - protein, 9 aa, synthetic construct
FPEDTVITY

SEQ ID NO: 6946 - protein, 10 aa, synthetic construct
FPEDVVRVIF

SEQ ID NO: 6947 - protein, 9 aa, synthetic construct
FPEELTQTF

SEQ ID NO: 6948 - protein, 9 aa, synthetic construct
FPEGLFYEF

SEQ ID NO: 6949 - protein, 9 aa, synthetic construct
FPEGSVELY

SEQ ID NO: 6950 - protein, 9 aa, synthetic construct
FPEHIFPAL

SEQ ID NO: 6951 - protein, 9 aa, synthetic construct
FPEIHVAQY

SEQ ID NO: 6952 - protein, 10 aa, synthetic construct
FPELGGGHAY

SEQ ID NO: 6953 - protein, 9 aa, synthetic construct
FPEPEHSSF

SEQ ID NO: 6954 - protein, 10 aa, synthetic construct
FPETTSPHEY

SEQ ID NO: 6955 - protein, 10 aa, synthetic construct
FPEVYVPTVF

SEQ ID NO: 6956 - protein, 10 aa, synthetic construct
FPFDVQPVPL

SEQ ID NO: 6957 - protein, 9 aa, synthetic construct
FPFERLYDL

SEQ ID NO: 6958 - protein, 9 aa, synthetic construct
FPFFDIAHY

SEQ ID NO: 6959 - protein, 8 aa, synthetic construct
FPFSRPEL

SEQ ID NO: 6960 - protein, 8 aa, synthetic construct
FPGKAFSW

SEQ ID NO: 6961 - protein, 9 aa, synthetic construct
FPGPAGPSF

SEQ ID NO: 6962 - protein, 9 aa, synthetic construct
FPHHVSPGF

SEQ ID NO: 6963 - protein, 9 aa, synthetic construct
FPHLREEIL

SEQ ID NO: 6964 - protein, 10 aa, synthetic construct
FPHNFQETTY

SEQ ID NO: 6965 - protein, 9 aa, synthetic construct
FPHPHIHEY

SEQ ID NO: 6966 - protein, 9 aa, synthetic construct
FPHPKYVDL

SEQ ID NO: 6967 - protein, 9 aa, synthetic construct
FPIHVQTSL

SEQ ID NO: 6968 - protein, 9 aa, synthetic construct
FPIPDLQKY

SEQ ID NO: 6969 - protein, 9 aa, synthetic construct
FPIPGEPGF

SEQ ID NO: 6970 - protein, 11 aa, synthetic construct
FPIPGEPGFPL

SEQ ID NO: 6971 - protein, 9 aa, synthetic construct
FPIPGPVLL

SEQ ID NO: 6972 - protein, 9 aa, synthetic construct
FPLDAAIIF

SEQ ID NO: 6973 - protein, 9 aa, synthetic construct
FPLDKAVAY

SEQ ID NO: 6974 - protein, 9 aa, synthetic construct
FPLHLPLEL

SEQ ID NO: 6975 - protein, 8 aa, synthetic construct
FPLKVFGY

SEQ ID NO: 6976 - protein, 9 aa, synthetic construct
FPLTTESAM

SEQ ID NO: 6977 - protein, 9 aa, synthetic construct
FPLMTIEEF

SEQ ID NO: 6978 - protein, 9 aa, synthetic construct
FPMPGFDEH

SEQ ID NO: 6979 - protein, 10 aa, synthetic construct
FPMTHGNTGF

SEQ ID NO: 6980 - protein, 9 aa, synthetic construct
FPNAIEHTL

SEQ ID NO: 6981 - protein, 9 aa, synthetic construct
FPNIPGKSL

SEQ ID NO: 6982 - protein, 9 aa, synthetic construct
FPNKQGYVL

SEQ ID NO: 6983 - protein, 9 aa, synthetic construct
FPNLRSISL

SEQ ID NO: 6984 - protein, 9 aa, synthetic construct
FPQATRQSL

SEQ ID NO: 6985 - protein, 9 aa, synthetic construct
FPQHTIASL

SEQ ID NO: 6986 - protein, 10 aa, synthetic construct
FPQKIAGELY

SEQ ID NO: 6987 - protein, 11 aa, synthetic construct
FPQLRATMEAY

SEQ ID NO: 6988 - protein, 8 aa, synthetic construct
FPQPAAVY

SEQ ID NO: 6989 - protein, 9 aa, synthetic construct
FPQYPDKEL

SEQ ID NO: 6990 - protein, 9 aa, synthetic construct
FPREPRPKL

SEQ ID NO: 6991 - protein, 9 aa, synthetic construct
FPRHIEPEL

SEQ ID NO: 6992 - protein, 8 aa, synthetic construct
FPRLKEDL

SEQ ID NO: 6993 - protein, 9 aa, synthetic construct
FPRNLAKSV

SEQ ID NO: 6994 - protein, 9 aa, synthetic construct
FPRSIDVKY

SEQ ID NO: 6995 - protein, 9 aa, synthetic construct
FPRSKVLKL

SEQ ID NO: 6996 - protein, 11 aa, synthetic construct
FPRSPGQPSSL

SEQ ID NO: 6997 - protein, 9 aa, synthetic construct
FPSEDILLV

SEQ ID NO: 6998 - protein, 9 aa, synthetic construct
FPSIVGRPR

SEQ ID NO: 6999 - protein, 10 aa, synthetic construct
FPSNLVSAAF

SEQ ID NO: 7000 - protein, 9 aa, synthetic construct
FPSNLVTEM

SEQ ID NO: 7001 - protein, 10 aa, synthetic construct
FPSNLVVAAF

SEQ ID NO: 7002 - protein, 9 aa, synthetic construct
FPSPPAFIF

SEQ ID NO: 7003 - protein, 10 aa, synthetic construct
FPSSVAALRF

SEQ ID NO: 7004 - protein, 11 aa, synthetic construct
FPTDPSKCVEY

SEQ ID NO: 7005 - protein, 10 aa, synthetic construct
FPTEESSINY

SEQ ID NO: 7006 - protein, 10 aa, synthetic construct
FPVAGQKLIY

SEQ ID NO: 7007 - protein, 9 aa, synthetic construct
FPVEIKSFY

SEQ ID NO: 7008 - protein, 10 aa, synthetic construct
FPVEIKSFYM

SEQ ID NO: 7009 - protein, 11 aa, synthetic construct
FPVETNCGHLF

SEQ ID NO: 7010 - protein, 9 aa, synthetic construct
FPVEVNTVL

SEQ ID NO: 7011 - protein, 10 aa, synthetic construct
FPVGGPGTSL

SEQ ID NO: 7012 - protein, 9 aa, synthetic construct
FPVGTVVEY

SEQ ID NO: 7013 - protein, 10 aa, synthetic construct
FPVKGLKTGY

SEQ ID NO: 7014 - protein, 11 aa, synthetic construct
FPVQLENVDSF

SEQ ID NO: 7015 - protein, 9 aa, synthetic construct
FPVSDGSNY

SEQ ID NO: 7016 - protein, 10 aa, synthetic construct
FPVSDGSNYF

SEQ ID NO: 7017 - protein, 9 aa, synthetic construct
FPVTPVSTL

SEQ ID NO: 7018 - protein, 11 aa, synthetic construct
FPVYVLPKVEY

SEQ ID NO: 7019 - protein, 11 aa, synthetic construct
FPWEVPKKLKY

SEQ ID NO: 7020 - protein, 10 aa, synthetic construct
FPWGDGNHTL

SEQ ID NO: 7021 - protein, 11 aa, synthetic construct
FPWGDGNHTLF

SEQ ID NO: 7022 - protein, 10 aa, synthetic construct
FPYADGPHQF

SEQ ID NO: 7023 - protein, 9 aa, synthetic construct
FPYAQRQFL

SEQ ID NO: 7024 - protein, 9 aa, synthetic construct
FPYEEHLEM

SEQ ID NO: 7025 - protein, 10 aa, synthetic construct
FPYEESKEKF

SEQ ID NO: 7026 - protein, 9 aa, synthetic construct
FPYSYEVAL

SEQ ID NO: 7027 - protein, 9 aa, synthetic construct
FPMAHPPNL

SEQ ID NO: 7028 - protein, 9 aa, synthetic construct
FPMEIRQYL

SEQ ID NO: 7029 - protein, 9 aa, synthetic construct
FPMELRQFL

SEQ ID NO: 7030 - protein, 8 aa, synthetic construct
FQALLTVV

SEQ ID NO: 7031 - protein, 8 aa, synthetic construct
FQAMNKEL

SEQ ID NO: 7032 - protein, 9 aa, synthetic construct
FQDPVPLTV

SEQ ID NO: 7033 - protein, 9 aa, synthetic construct
FQIGKMRYV

SEQ ID NO: 7034 - protein, 8 aa, synthetic construct
FQKTKNLL

SEQ ID NO: 7035 - protein, 8 aa, synthetic construct
FQNLIKKI

SEQ ID NO: 7036 - protein, 8 aa, synthetic construct
FQRLVREI

SEQ ID NO: 7037 - protein, 9 aa, synthetic construct
FQSLPHENK

SEQ ID NO: 7038 - protein, 8 aa, synthetic construct
FQTEIQTV

SEQ ID NO: 7039 - protein, 8 aa, synthetic construct
FQTIHKTI

SEQ ID NO: 7040 - protein, 8 aa, synthetic construct
FQTILTEI

SEQ ID NO: 7041 - protein, 8 aa, synthetic construct
FQYEVTEV

SEQ ID NO: 7042 - protein, 8 aa, synthetic construct
FQYFVKVV

SEQ ID NO: 7043 - protein, 8 aa, synthetic construct
FQYLKQVL

SEQ ID NO: 7044 - protein, 9 aa, synthetic construct
FRAPSMKEL

SEQ ID NO: 7045 - protein, 9 aa, synthetic construct
FRAMFCNDL

SEQ ID NO: 7046 - protein, 8 aa, synthetic construct
FRDQEPKI

SEQ ID NO: 7047 - protein, 9 aa, synthetic construct
FREPRLLVV

SEQ ID NO: 7048 - protein, 9 aa, synthetic construct
FRFENVNGY

SEQ ID NO: 7049 - protein, 9 aa, synthetic construct
FRFIEVQTL

SEQ ID NO: 7050 - protein, 9 aa, synthetic construct
FRHEVGYVL

SEQ ID NO: 7051 - protein, 9 aa, synthetic construct
FRHPHIIKL

SEQ ID NO: 7052 - protein, 9 aa, synthetic construct
FRIEGVKSV

SEQ ID NO: 7053 - protein, 9 aa, synthetic construct
FRKNFATSL

SEQ ID NO: 7054 - protein, 9 aa, synthetic construct
FRKVDVDEY

SEQ ID NO: 7055 - protein, 9 aa, synthetic construct
FRLDTPLYF

SEQ ID NO: 7056 - protein, 9 aa, synthetic construct
FRNLHTIVL

SEQ ID NO: 7057 - protein, 9 aa, synthetic construct
FRNSLGLIY

SEQ ID NO: 7058 - protein, 9 aa, synthetic construct
FRNVEVLIY

SEQ ID NO: 7059 - protein, 9 aa, synthetic construct
FRPDEPYYY

SEQ ID NO: 7060 - protein, 9 aa, synthetic construct
FRPEWQSVY

SEQ ID NO: 7061 - protein, 9 aa, synthetic construct
FRPPNPWTM

SEQ ID NO: 7062 - protein, 9 aa, synthetic construct
FRQIIAVVL

SEQ ID NO: 7063 - protein, 9 aa, synthetic construct
FRSFVVSKF

SEQ ID NO: 7064 - protein, 9 aa, synthetic construct
FRSLPRHTF

SEQ ID NO: 7065 - protein, 9 aa, synthetic construct
FRSNGVQLL

SEQ ID NO: 7066 - protein, 9 aa, synthetic construct
FRSSIPVYK

SEQ ID NO: 7067 - protein, 10 aa, synthetic construct
FRSSIPVYKK

SEQ ID NO: 7068 - protein, 9 aa, synthetic construct
FRTPHVLVL

SEQ ID NO: 7069 - protein, 9 aa, synthetic construct
FRVDYILSV

SEQ ID NO: 7070 - protein, 9 aa, synthetic construct
FRVHTVMTL

SEQ ID NO: 7071 - protein, 11 aa, synthetic construct
FRVPFIYGHKY

SEQ ID NO: 7072 - protein, 9 aa, synthetic construct
FRVPTANVS

SEQ ID NO: 7073 - protein, 10 aa, synthetic construct
FRVPTANVSV

SEQ ID NO: 7074 - protein, 9 aa, synthetic construct
FRYHGLSSL

SEQ ID NO: 7075 - protein, 9 aa, synthetic construct
FSDVDSPYY

SEQ ID NO: 7076 - protein, 9 aa, synthetic construct
FSDVMEDLY

SEQ ID NO: 7077 - protein, 9 aa, synthetic construct
FSDYLHPQY

SEQ ID NO: 7078 - protein, 10 aa, synthetic construct
FSEDGEYFAY

SEQ ID NO: 7079 - protein, 9 aa, synthetic construct
FSEEGAVGY

SEQ ID NO: 7080 - protein, 10 aa, synthetic construct
FSFGGKLVTF

SEQ ID NO: 7081 - protein, 9 aa, synthetic construct
FSFVRVISL

SEQ ID NO: 7082 - protein, 8 aa, synthetic construct
FSGPAITL

SEQ ID NO: 7083 - protein, 9 aa, synthetic construct
FSHAQTVVL

SEQ ID NO: 7084 - protein, 9 aa, synthetic construct
FSHPNVIRL

SEQ ID NO: 7085 - protein, 9 aa, synthetic construct
FSHRIYVAY

SEQ ID NO: 7086 - protein, 8 aa, synthetic construct
FSHYSGLK

SEQ ID NO: 7087 - protein, 9 aa, synthetic construct
FSIDSPDSL

SEQ ID NO: 7088 - protein, 11 aa, synthetic construct
FSIVEQRLEAE

SEQ ID NO: 7089 - protein, 9 aa, synthetic construct
FSKKNFESL

SEQ ID NO: 7090 - protein, 9 aa, synthetic construct
FSKMKALAV

SEQ ID NO: 7091 - protein, 11 aa, synthetic construct
FSLSMTDLSKS

SEQ ID NO: 7092 - protein, 9 aa, synthetic construct
FSNDIYSTY

SEQ ID NO: 7093 - protein, 9 aa, synthetic construct
FSNPRALYL

SEQ ID NO: 7094 - protein, 9 aa, synthetic construct
FSPAPRPEM

SEQ ID NO: 7095 - protein, 9 aa, synthetic construct
FSPNRVIGL

SEQ ID NO: 7096 - protein, 10 aa, synthetic construct
FSPSGIFGAF

SEQ ID NO: 7097 - protein, 10 aa, synthetic construct
FSRFLNKQPY

SEQ ID NO: 7098 - protein, 11 aa, synthetic construct
FSVFYVSSLMG

SEQ ID NO: 7099 - protein, 9 aa, synthetic construct
FSVISVVSY

SEQ ID NO: 7100 - protein, 10 aa, synthetic construct
FSVTALDPDS

SEQ ID NO: 7101 - protein, 9 aa, synthetic construct
FSYDENTVY

SEQ ID NO: 7102 - protein, 8 aa, synthetic construct
FTALLNID

SEQ ID NO: 7103 - protein, 10 aa, synthetic construct
FTDEEGYGRY

SEQ ID NO: 7104 - protein, 10 aa, synthetic construct
FTDESYLELY

SEQ ID NO: 7105 - protein, 9 aa, synthetic construct
FTDIDGQVY

SEQ ID NO: 7106 - protein, 9 aa, synthetic construct
FTEDQTAEF

SEQ ID NO: 7107 - protein, 9 aa, synthetic construct
FTEEELARY

SEQ ID NO: 7108 - protein, 9 aa, synthetic construct
FTEQWTDGY

SEQ ID NO: 7109 - protein, 9 aa, synthetic construct
FTEQYNEQY

SEQ ID NO: 7110 - protein, 9 aa, synthetic construct
FTFDHGMGY

SEQ ID NO: 7111 - protein, 9 aa, synthetic construct
FTIQDILDY

SEQ ID NO: 7112 - protein, 9 aa, synthetic construct
FTKHKYFGL

SEQ ID NO: 7113 - protein, 8 aa, synthetic construct
FTKVKPLL

SEQ ID NO: 7114 - protein, 9 aa, synthetic construct
FTLLVPALK

SEQ ID NO: 7115 - protein, 9 aa, synthetic construct
FTPDSLAAL

SEQ ID NO: 7116 - protein, 9 aa, synthetic construct
FTPVCTTEL

SEQ ID NO: 7117 - protein, 9 aa, synthetic construct
FTRPGTVRL

SEQ ID NO: 7118 - protein, 9 aa, synthetic construct
FTVDGIPYF

SEQ ID NO: 7119 - protein, 9 aa, synthetic construct
FTVDQIRAI

SEQ ID NO: 7120 - protein, 9 aa, synthetic construct
FTVDSQMSY

SEQ ID NO: 7121 - protein, 10 aa, synthetic construct
FTVIVDGRKS

SEQ ID NO: 7122 - protein, 11 aa, synthetic construct
FTVVLNPISIF

SEQ ID NO: 7123 - protein, 9 aa, synthetic construct
FVAEQKVEY

SEQ ID NO: 7124 - protein, 9 aa, synthetic construct
FVAGVVTFY

SEQ ID NO: 7125 - protein, 11 aa, synthetic construct
FVAPATGAHNY

SEQ ID NO: 7126 - protein, 9 aa, synthetic construct
FVAPEIVNY

SEQ ID NO: 7127 - protein, 10 aa, synthetic construct
FVAPVDLQAY

SEQ ID NO: 7128 - protein, 9 aa, synthetic construct
FVDDYTVRV

SEQ ID NO: 7129 - protein, 9 aa, synthetic construct
FVDEFLTYL

SEQ ID NO: 7130 - protein, 9 aa, synthetic construct
FVDPLVTNY

SEQ ID NO: 7131 - protein, 9 aa, synthetic construct
FVFFQGETF

SEQ ID NO: 7132 - protein, 10 aa, synthetic construct
FVFTEKEGTY

SEQ ID NO: 7133 - protein, 9 aa, synthetic construct
FVGNLNFNK

SEQ ID NO: 7134 - protein, 9 aa, synthetic construct
FVHDLVLYL

SEQ ID NO: 7135 - protein, 9 aa, synthetic construct
FVHPKPVSL

SEQ ID NO: 7136 - protein, 9 aa, synthetic construct
FVHPRLLSV

SEQ ID NO: 7137 - protein, 8 aa, synthetic construct
FVIKKHEL

SEQ ID NO: 7138 - protein, 9 aa, synthetic construct
FVINEVCEM

SEQ ID NO: 7139 - protein, 9 aa, synthetic construct
FVISNTTGY

SEQ ID NO: 7140 - protein, 9 aa, synthetic construct
FVKDSIRLV

SEQ ID NO: 7141 - protein, 9 aa, synthetic construct
FVKERQLHL

SEQ ID NO: 7142 - protein, 9 aa, synthetic construct
FVKVVPTVY

SEQ ID NO: 7143 - protein, 9 aa, synthetic construct
FVLKEGVEY

SEQ ID NO: 7144 - protein, 9 aa, synthetic construct
FVLPELPSV

SEQ ID NO: 7145 - protein, 9 aa, synthetic construct
FVMETFVHL

SEQ ID NO: 7146 - protein, 9 aa, synthetic construct
FVNDDRHVM

SEQ ID NO: 7147 - protein, 8 aa, synthetic construct
FVNDIFER

SEQ ID NO: 7148 - protein, 11 aa, synthetic construct
FVNETKFSSPT

SEQ ID NO: 7149 - protein, 9 aa, synthetic construct
FVNPGVVEF

SEQ ID NO: 7150 - protein, 9 aa, synthetic construct
FVNPHVSSF

SEQ ID NO: 7151 - protein, 9 aa, synthetic construct
FVNPTSFVY

SEQ ID NO: 7152 - protein, 9 aa, synthetic construct
FVPGTTAVL

SEQ ID NO: 7153 - protein, 9 aa, synthetic construct
FVPTKTHVL

SEQ ID NO: 7154 - protein, 9 aa, synthetic construct
FVRNVPWEF

SEQ ID NO: 7155 - protein, 9 aa, synthetic construct
FVSENVTQY

SEQ ID NO: 7156 - protein, 9 aa, synthetic construct
FVTDTAKAL

SEQ ID NO: 7157 - protein, 9 aa, synthetic construct
FVTIKKDVD

SEQ ID NO: 7158 - protein, 9 aa, synthetic construct
FVVEHDFIM

SEQ ID NO: 7159 - protein, 9 aa, synthetic construct
FVVERQPCM

SEQ ID NO: 7160 - protein, 9 aa, synthetic construct
FVYEDMEAL

SEQ ID NO: 7161 - protein, 10 aa, synthetic construct
FVYEQKLNEY

SEQ ID NO: 7162 - protein, 9 aa, synthetic construct
FVYKEEHPF

SEQ ID NO: 7163 - protein, 9 aa, synthetic construct
FYDECLRKY

SEQ ID NO: 7164 - protein, 8 aa, synthetic construct
FYDIVAEL

SEQ ID NO: 7165 - protein, 10 aa, synthetic construct
FYDLYGGEKF

SEQ ID NO: 7166 - protein, 9 aa, synthetic construct
FYDPDTVEL

SEQ ID NO: 7167 - protein, 9 aa, synthetic construct
FYHKYFNYL

SEQ ID NO: 7168 - protein, 9 aa, synthetic construct
FYPEEVSSM

SEQ ID NO: 7169 - protein, 9 aa, synthetic construct
FYPGLGLAL

SEQ ID NO: 7170 - protein, 8 aa, synthetic construct
FYQEHPDL

SEQ ID NO: 7171 - protein, 10 aa, synthetic construct
FYQLIHQGTK

SEQ ID NO: 7172 - protein, 9 aa, synthetic construct
FMATIAEGL

SEQ ID NO: 7173 - protein, 9 aa, synthetic construct
FMDESTQCF

SEQ ID NO: 7174 - protein, 9 aa, synthetic construct
FMDPASALY

SEQ ID NO: 7175 - protein, 10 aa, synthetic construct
FMEKETPLRY

SEQ ID NO: 7176 - protein, 10 aa, synthetic construct
FMFDEKLVTV

SEQ ID NO: 7177 - protein, 9 aa, synthetic construct
FMKPGKVVL

SEQ ID NO: 7178 - protein, 8 aa, synthetic construct
FMLKKIVL

SEQ ID NO: 7179 - protein, 11 aa, synthetic construct
FMPGFAPLTSR

SEQ ID NO: 7180 - protein, 9 aa, synthetic construct
FMPKSYEAL

SEQ ID NO: 7181 - protein, 9 aa, synthetic construct
GAAPCRLAL

SEQ ID NO: 7182 - protein, 9 aa, synthetic construct
GAEVYHNLK

SEQ ID NO: 7183 - protein, 11 aa, synthetic construct
GAGGGFGSRSL

SEQ ID NO: 7184 - protein, 9 aa, synthetic construct
GAGPVLEAF

SEQ ID NO: 7185 - protein, 8 aa, synthetic construct
GAKFRISL

SEQ ID NO: 7186 - protein, 10 aa, synthetic construct
GALTASREWG

SEQ ID NO: 7187 - protein, 9 aa, synthetic construct
GAQGVILVY

SEQ ID NO: 7188 - protein, 10 aa, synthetic construct
GAQILLHSHK

SEQ ID NO: 7189 - protein, 10 aa, synthetic construct
GAVHDVKDVL

SEQ ID NO: 7190 - protein, 9 aa, synthetic construct
GAVKLSISY

SEQ ID NO: 7191 - protein, 8 aa, synthetic construct
GAVNFQEF

SEQ ID NO: 7192 - protein, 9 aa, synthetic construct
GAVPIFIEL

SEQ ID NO: 7193 - protein, 11 aa, synthetic construct
GAWDESGVFIY

SEQ ID NO: 7194 - protein, 9 aa, synthetic construct
GAMGIMLVY

SEQ ID NO: 7195 - protein, 10 aa, synthetic construct
GDAKTDQAQK

SEQ ID NO: 7196 - protein, 11 aa, synthetic construct
GDAKTDQAQKA

SEQ ID NO: 7197 - protein, 9 aa, synthetic construct
GDGLIELRK

SEQ ID NO: 7198 - protein, 10 aa, synthetic construct
GDGPVVTDPK

SEQ ID NO: 7199 - protein, 9 aa, synthetic construct
GDSDLQLDR

SEQ ID NO: 7200 - protein, 9 aa, synthetic construct
GDVFYLHSR

SEQ ID NO: 7201 - protein, 10 aa, synthetic construct
GEAEAFAIGA

SEQ ID NO: 7202 - protein, 9 aa, synthetic construct
GEAIPALAA

SEQ ID NO: 7203 - protein, 11 aa, synthetic construct
GEALSTLVLNR

SEQ ID NO: 7204 - protein, 11 aa, synthetic construct
GECLKCIYNTA

SEQ ID NO: 7205 - protein, 9 aa, synthetic construct
GEDGSICVL

SEQ ID NO: 7206 - protein, 10 aa, synthetic construct
GEDPTSVAIA

SEQ ID NO: 7207 - protein, 9 aa, synthetic construct
GEDSSFLVV

SEQ ID NO: 7208 - protein, 11 aa, synthetic construct
GEDSSFLVVRL

SEQ ID NO: 7209 - protein, 10 aa, synthetic construct
GEEALLRYVL

SEQ ID NO: 7210 - protein, 9 aa, synthetic construct
GEEDVIYTW

SEQ ID NO: 7211 - protein, 11 aa, synthetic construct
GEEEIQKPEEK

SEQ ID NO: 7212 - protein, 9 aa, synthetic construct
GEEILITVL

SEQ ID NO: 7213 - protein, 11 aa, synthetic construct
GEEPLGVGSVA

SEQ ID NO: 7214 - protein, 10 aa, synthetic construct
GEERATAISL

SEQ ID NO: 7215 - protein, 9 aa, synthetic construct
GEFAKVLEL

SEQ ID NO: 7216 - protein, 9 aa, synthetic construct
GEFDGSVTF

SEQ ID NO: 7217 - protein, 9 aa, synthetic construct
GEFEGFVAV

SEQ ID NO: 7218 - protein, 9 aa, synthetic construct
GEFEKKYVA

SEQ ID NO: 7219 - protein, 9 aa, synthetic construct
GEFELAIVA

SEQ ID NO: 7220 - protein, 10 aa, synthetic construct
GEFFGSASQP

SEQ ID NO: 7221 - protein, 8 aa, synthetic construct
GEFGGFGS

SEQ ID NO: 7222 - protein, 9 aa, synthetic construct
GEFGGFGSV

SEQ ID NO: 7223 - protein, 10 aa, synthetic construct
GEFGGFGSVS

SEQ ID NO: 7224 - protein, 11 aa, synthetic construct
GEFGGFGSVSG

SEQ ID NO: 7225 - protein, 9 aa, synthetic construct
GEFGGFSEV

SEQ ID NO: 7226 - protein, 11 aa, synthetic construct
GEFGGFSEVSP

SEQ ID NO: 7227 - protein, 10 aa, synthetic construct
GEFNEVFNDV

SEQ ID NO: 7228 - protein, 10 aa, synthetic construct
GEFPFAKCFV

SEQ ID NO: 7229 - protein, 10 aa, synthetic construct
GEFREAFKEA

SEQ ID NO: 7230 - protein, 10 aa, synthetic construct
GEFRQGLISA

SEQ ID NO: 7231 - protein, 11 aa, synthetic construct
GEFSKEWAAVF

SEQ ID NO: 7232 - protein, 9 aa, synthetic construct
GEGTGEVVL

SEQ ID NO: 7233 - protein, 9 aa, synthetic construct
GEHCDFTIL

SEQ ID NO: 7234 - protein, 10 aa, synthetic construct
GEHERPEFIA

SEQ ID NO: 7235 - protein, 10 aa, synthetic construct
GEHTYLFAQA

SEQ ID NO: 7236 - protein, 10 aa, synthetic construct
GEIDASVPEL

SEQ ID NO: 7237 - protein, 10 aa, synthetic construct
GEIDGNKVTL

SEQ ID NO: 7238 - protein, 9 aa, synthetic construct
GEIEDLQQW

SEQ ID NO: 7239 - protein, 10 aa, synthetic construct
GEIEGFRLSA

SEQ ID NO: 7240 - protein, 9 aa, synthetic construct
GEIENRITA

SEQ ID NO: 7241 - protein, 10 aa, synthetic construct
GEIENRITAA

SEQ ID NO: 7242 - protein, 10 aa, synthetic construct
GEIESKFNQA

SEQ ID NO: 7243 - protein, 9 aa, synthetic construct
GEIFSLCLP

SEQ ID NO: 7244 - protein, 9 aa, synthetic construct
GEIGHFDSV

SEQ ID NO: 7245 - protein, 9 aa, synthetic construct
GEILRTEQW

SEQ ID NO: 7246 - protein, 9 aa, synthetic construct
GEIRTITVV

SEQ ID NO: 7247 - protein, 8 aa, synthetic construct
GEITFLEA

SEQ ID NO: 7248 - protein, 9 aa, synthetic construct
GEIVRLTTP

SEQ ID NO: 7249 - protein, 8 aa, synthetic construct
GEKEAKSD

SEQ ID NO: 7250 - protein, 9 aa, synthetic construct
GEKSFFLQP

SEQ ID NO: 7251 - protein, 9 aa, synthetic construct
GELERALSA

SEQ ID NO: 7252 - protein, 9 aa, synthetic construct
GELILWQEA

SEQ ID NO: 7253 - protein, 9 aa, synthetic construct
GELLNMIVA

SEQ ID NO: 7254 - protein, 9 aa, synthetic construct
GELLPTPSA

SEQ ID NO: 7255 - protein, 9 aa, synthetic construct
GELLMHPVL

SEQ ID NO: 7256 - protein, 9 aa, synthetic construct
GELMAFLLP

SEQ ID NO: 7257 - protein, 8 aa, synthetic construct
GELPEHAK

SEQ ID NO: 7258 - protein, 9 aa, synthetic construct
GELPLSLAA

SEQ ID NO: 7259 - protein, 9 aa, synthetic construct
GEMFKLRAA

SEQ ID NO: 7260 - protein, 9 aa, synthetic construct
GENFDKLLA

SEQ ID NO: 7261 - protein, 9 aa, synthetic construct
GENVFFVVT

SEQ ID NO: 7262 - protein, 10 aa, synthetic construct
GESDDSILRL

SEQ ID NO: 7263 - protein, 9 aa, synthetic construct
GESQTLLAA

SEQ ID NO: 7264 - protein, 9 aa, synthetic construct
GETFKFKEA

SEQ ID NO: 7265 - protein, 8 aa, synthetic construct
GETIFVTA

SEQ ID NO: 7266 - protein, 9 aa, synthetic construct
GETIFVTAP

SEQ ID NO: 7267 - protein, 10 aa, synthetic construct
GETKMVETAL

SEQ ID NO: 7268 - protein, 9 aa, synthetic construct
GETYFDVVA

SEQ ID NO: 7269 - protein, 9 aa, synthetic construct
GEVDPKVAL

SEQ ID NO: 7270 - protein, 9 aa, synthetic construct
GEVEKLIKC

SEQ ID NO: 7271 - protein, 8 aa, synthetic construct
GEVPLTPT

SEQ ID NO: 7272 - protein, 9 aa, synthetic construct
GEVPPGPLP

SEQ ID NO: 7273 - protein, 11 aa, synthetic construct
GEVTNDFVMLK

SEQ ID NO: 7274 - protein, 11 aa, synthetic construct
GEVTPYANTNN

SEQ ID NO: 7275 - protein, 9 aa, synthetic construct
GEVYPFGIV

SEQ ID NO: 7276 - protein, 9 aa, synthetic construct
GEWGQFMDA

SEQ ID NO: 7277 - protein, 9 aa, synthetic construct
GEYAYVTVC

SEQ ID NO: 7278 - protein, 9 aa, synthetic construct
GEYDVGVVA

SEQ ID NO: 7279 - protein, 11 aa, synthetic construct
GEYEIAEGISA

SEQ ID NO: 7280 - protein, 9 aa, synthetic construct
GEYGKFFVT

SEQ ID NO: 7281 - protein, 10 aa, synthetic construct
GEYGKFFVTL

SEQ ID NO: 7282 - protein, 9 aa, synthetic construct
GEYIIRQGA

SEQ ID NO: 7283 - protein, 10 aa, synthetic construct
GEYNLFSRKI

SEQ ID NO: 7284 - protein, 11 aa, synthetic construct
GEYVSLGKVEA

SEQ ID NO: 7285 - protein, 9 aa, synthetic construct
GEYWCEVTV

SEQ ID NO: 7286 - protein, 9 aa, synthetic construct
GEYYNVPIP

SEQ ID NO: 7287 - protein, 9 aa, synthetic construct
GEMFFMRTP

SEQ ID NO: 7288 - protein, 9 aa, synthetic construct
GEMVALPPV

SEQ ID NO: 7289 - protein, 9 aa, synthetic construct
GEMVTFINW

SEQ ID NO: 7290 - protein, 11 aa, synthetic construct
GFAFVTFDDHD

SEQ ID NO: 7291 - protein, 9 aa, synthetic construct
GFDLQETLV

SEQ ID NO: 7292 - protein, 11 aa, synthetic construct
GFGFVTFDDHD

SEQ ID NO: 7293 - protein, 10 aa, synthetic construct
GFGGASGGGY

SEQ ID NO: 7294 - protein, 10 aa, synthetic construct
GFGGESGGSY

SEQ ID NO: 7295 - protein, 9 aa, synthetic construct
GFGGGFGGD

SEQ ID NO: 7296 - protein, 9 aa, synthetic construct
GFGGGGGFG

SEQ ID NO: 7297 - protein, 8 aa, synthetic construct
GFHTQISK

SEQ ID NO: 7298 - protein, 10 aa, synthetic construct
GFLDYCMKVP

SEQ ID NO: 7299 - protein, 8 aa, synthetic construct
GFPLERPK

SEQ ID NO: 7300 - protein, 9 aa, synthetic construct
GFYEGIMLV

SEQ ID NO: 7301 - protein, 9 aa, synthetic construct
GFYKNVVKI

SEQ ID NO: 7302 - protein, 11 aa, synthetic construct
GFYPAEITLTW

SEQ ID NO: 7303 - protein, 9 aa, synthetic construct
GFYPGQVLI

SEQ ID NO: 7304 - protein, 10 aa, synthetic construct
GGAGGLRSHL

SEQ ID NO: 7305 - protein, 10 aa, synthetic construct
GGFGGGFGGD

SEQ ID NO: 7306 - protein, 9 aa, synthetic construct
GGFGGGGFG

SEQ ID NO: 7307 - protein, 10 aa, synthetic construct
GGFGGGGFGG

SEQ ID NO: 7308 - protein, 11 aa, synthetic construct
GGFGGGGFGGG

SEQ ID NO: 7309 - protein, 11 aa, synthetic construct
GGFGGGSFRGS

SEQ ID NO: 7310 - protein, 10 aa, synthetic construct
GGFGGGSRGF

SEQ ID NO: 7311 - protein, 8 aa, synthetic construct
GGFSGGSF

SEQ ID NO: 7312 - protein, 11 aa, synthetic construct
GGGFGGGFGGD

SEQ ID NO: 7313 - protein, 10 aa, synthetic construct
GGGFGGGGFG

SEQ ID NO: 7314 - protein, 11 aa, synthetic construct
GGGFGGGGFGG

SEQ ID NO: 7315 - protein, 10 aa, synthetic construct
GGGIGGGGFG

SEQ ID NO: 7316 - protein, 11 aa, synthetic construct
GGGSGGGFSAS

SEQ ID NO: 7317 - protein, 10 aa, synthetic construct
GGGVIPHIHK

SEQ ID NO: 7318 - protein, 8 aa, synthetic construct
GGKLSKKK

SEQ ID NO: 7319 - protein, 9 aa, synthetic construct
GGKLSKKKK

SEQ ID NO: 7320 - protein, 10 aa, synthetic construct
GGKLSKKKKG

SEQ ID NO: 7321 - protein, 11 aa, synthetic construct
GGLGGFGGGSF

SEQ ID NO: 7322 - protein, 9 aa, synthetic construct
GGLGKLGKD

SEQ ID NO: 7323 - protein, 10 aa, synthetic construct
GGLGKLGKDA

SEQ ID NO: 7324 - protein, 10 aa, synthetic construct
GGLSIPHSTK

SEQ ID NO: 7325 - protein, 11 aa, synthetic construct
GGSFGAGGGFG

SEQ ID NO: 7326 - protein, 9 aa, synthetic construct
GGSFGGGSF

SEQ ID NO: 7327 - protein, 10 aa, synthetic construct
GGSFGGGSFG

SEQ ID NO: 7328 - protein, 11 aa, synthetic construct
GGSFGGGSFGG

SEQ ID NO: 7329 - protein, 11 aa, synthetic construct
GGTSDVEVNEK

SEQ ID NO: 7330 - protein, 9 aa, synthetic construct
GGVIPHIHK

SEQ ID NO: 7331 - protein, 8 aa, synthetic construct
GHPAPNFK

SEQ ID NO: 7332 - protein, 11 aa, synthetic construct
GHYTEGAELVD

SEQ ID NO: 7333 - protein, 9 aa, synthetic construct
GIDSSSPEV

SEQ ID NO: 7334 - protein, 8 aa, synthetic construct
GIEIPAEK

SEQ ID NO: 7335 - protein, 9 aa, synthetic construct
GIELAVRPH

SEQ ID NO: 7336 - protein, 10 aa, synthetic construct
GIFPGTPLKK

SEQ ID NO: 7337 - protein, 11 aa, synthetic construct
GIGGGGFGGFG

SEQ ID NO: 7338 - protein, 10 aa, synthetic construct
GIIADYTMSL

SEQ ID NO: 7339 - protein, 8 aa, synthetic construct
GIKVKIML

SEQ ID NO: 7340 - protein, 8 aa, synthetic construct
GILFSHPR

SEQ ID NO: 7341 - protein, 9 aa, synthetic construct
GILKPLPKK

SEQ ID NO: 7342 - protein, 9 aa, synthetic construct
GIMLPVLGI

SEQ ID NO: 7343 - protein, 9 aa, synthetic construct
GINADIRGI

SEQ ID NO: 7344 - protein, 8 aa, synthetic construct
GIPHLVTH

SEQ ID NO: 7345 - protein, 9 aa, synthetic construct
GIPHLVTHD

SEQ ID NO: 7346 - protein, 10 aa, synthetic construct
GISVLEMSHR

SEQ ID NO: 7347 - protein, 11 aa, synthetic construct
GKGAVHDVKDV

SEQ ID NO: 7348 - protein, 8 aa, synthetic construct
GKLSKKKK

SEQ ID NO: 7349 - protein, 9 aa, synthetic construct
GKLSKKKKG

SEQ ID NO: 7350 - protein, 10 aa, synthetic construct
GKVKVGVNGF

SEQ ID NO: 7351 - protein, 8 aa, synthetic construct
GKMRYVSV

SEQ ID NO: 7352 - protein, 11 aa, synthetic construct
GLADASLLKKV

SEQ ID NO: 7353 - protein, 9 aa, synthetic construct
GLAEVAAAV

SEQ ID NO: 7354 - protein, 9 aa, synthetic construct
GLAKRVWSL

SEQ ID NO: 7355 - protein, 9 aa, synthetic construct
GLAQIFMQY

SEQ ID NO: 7356 - protein, 8 aa, synthetic construct
GLARAKSV

SEQ ID NO: 7357 - protein, 9 aa, synthetic construct
GLARVILSK

SEQ ID NO: 7358 - protein, 9 aa, synthetic construct
GLDDVLVGA

SEQ ID NO: 7359 - protein, 9 aa, synthetic construct
GLEIPQKEI

SEQ ID NO: 7360 - protein, 9 aa, synthetic construct
GLGCVLIRK

SEQ ID NO: 7361 - protein, 10 aa, synthetic construct
GLGGGYGGGF

SEQ ID NO: 7362 - protein, 9 aa, synthetic construct
GLGPPGRSV

SEQ ID NO: 7363 - protein, 9 aa, synthetic construct
GLHLRLTSL

SEQ ID NO: 7364 - protein, 9 aa, synthetic construct
GLIDEIYGI

SEQ ID NO: 7365 - protein, 9 aa, synthetic construct
GLIDENPGL

SEQ ID NO: 7366 - protein, 10 aa, synthetic construct
GLIDGRLTIC

SEQ ID NO: 7367 - protein, 9 aa, synthetic construct
GLIDHQTYL

SEQ ID NO: 7368 - protein, 9 aa, synthetic construct
GLIDKVNEL

SEQ ID NO: 7369 - protein, 9 aa, synthetic construct
GLIDVHVHL

SEQ ID NO: 7370 - protein, 9 aa, synthetic construct
GLIENPALL

SEQ ID NO: 7371 - protein, 9 aa, synthetic construct
GLKGRVFEV

SEQ ID NO: 7372 - protein, 9 aa, synthetic construct
GLKPEGVPR

SEQ ID NO: 7373 - protein, 9 aa, synthetic construct
GLKVREYEL

SEQ ID NO: 7374 - protein, 10 aa, synthetic construct
GLLEKIATPK

SEQ ID NO: 7375 - protein, 9 aa, synthetic construct
GLLERRAAL

SEQ ID NO: 7376 - protein, 9 aa, synthetic construct
GLLERVKEL

SEQ ID NO: 7377 - protein, 9 aa, synthetic construct
GLLGNVAEV

SEQ ID NO: 7378 - protein, 9 aa, synthetic construct
GLLLGATDE

SEQ ID NO: 7379 - protein, 9 aa, synthetic construct
GLLPDVPSL

SEQ ID NO: 7380 - protein, 8 aa, synthetic construct
GLLRLHSL

SEQ ID NO: 7381 - protein, 8 aa, synthetic construct
GLLYSAGG

SEQ ID NO: 7382 - protein, 9 aa, synthetic construct
GLMGFIVYK

SEQ ID NO: 7383 - protein, 9 aa, synthetic construct
GLMKKAYEL

SEQ ID NO: 7384 - protein, 9 aa, synthetic construct
GLNEEIARV

SEQ ID NO: 7385 - protein, 8 aa, synthetic construct
GLPVTFID

SEQ ID NO: 7386 - protein, 10 aa, synthetic construct
GLSENPFASL

SEQ ID NO: 7387 - protein, 9 aa, synthetic construct
GLSQVAVTV

SEQ ID NO: 7388 - protein, 9 aa, synthetic construct
GLSSDLQQV

SEQ ID NO: 7389 - protein, 10 aa, synthetic construct
GLTEGLHGFH

SEQ ID NO: 7390 - protein, 11 aa, synthetic construct
GLTEGLHGFHV

SEQ ID NO: 7391 - protein, 11 aa, synthetic construct
GLVDEKALAQA

SEQ ID NO: 7392 - protein, 9 aa, synthetic construct
GLVPFLVSV

SEQ ID NO: 7393 - protein, 9 aa, synthetic construct
GLWHMKTYK

SEQ ID NO: 7394 - protein, 9 aa, synthetic construct
GLYEFFRAK

SEQ ID NO: 7395 - protein, 9 aa, synthetic construct
GLYEGLTWL

SEQ ID NO: 7396 - protein, 9 aa, synthetic construct
GLYPNLIQV

SEQ ID NO: 7397 - protein, 9 aa, synthetic construct
GLYSEIFFI

SEQ ID NO: 7398 - protein, 9 aa, synthetic construct
GLYSGVTTV

SEQ ID NO: 7399 - protein, 9 aa, synthetic construct
GLYYIHRNK

SEQ ID NO: 7400 - protein, 10 aa, synthetic construct
GLMDDVDFKA

SEQ ID NO: 7401 - protein, 8 aa, synthetic construct
GMPITLTV

SEQ ID NO: 7402 - protein, 9 aa, synthetic construct
GMYDKILLF

SEQ ID NO: 7403 - protein, 9 aa, synthetic construct
GNAFIVSAI

SEQ ID NO: 7404 - protein, 10 aa, synthetic construct
GNLEAIHIIK

SEQ ID NO: 7405 - protein, 9 aa, synthetic construct
GPAAAASSL

SEQ ID NO: 7406 - protein, 10 aa, synthetic construct
GPAATSGAVL

SEQ ID NO: 7407 - protein, 9 aa, synthetic construct
GPAGPGASL

SEQ ID NO: 7408 - protein, 9 aa, synthetic construct
GPAGPILSL

SEQ ID NO: 7409 - protein, 9 aa, synthetic construct
GPAIERMGL

SEQ ID NO: 7410 - protein, 9 aa, synthetic construct
GPAPPGLAI

SEQ ID NO: 7411 - protein, 9 aa, synthetic construct
GPAPRVLSL

SEQ ID NO: 7412 - protein, 9 aa, synthetic construct
GPAPVGRFF

SEQ ID NO: 7413 - protein, 9 aa, synthetic construct
GPASRVSQL

SEQ ID NO: 7414 - protein, 8 aa, synthetic construct
GPAMGPAL

SEQ ID NO: 7415 - protein, 11 aa, synthetic construct
GPCGLRVAVEL

SEQ ID NO: 7416 - protein, 11 aa, synthetic construct
GPCGPCSEIHY

SEQ ID NO: 7417 - protein, 11 aa, synthetic construct
GPDEAKIKALL

SEQ ID NO: 7418 - protein, 9 aa, synthetic construct
GPESRTISL

SEQ ID NO: 7419 - protein, 9 aa, synthetic construct
GPFSEISAF

SEQ ID NO: 7420 - protein, 10 aa, synthetic construct
GPGGFGPGGY

SEQ ID NO: 7421 - protein, 11 aa, synthetic construct
GPGLSRTGVEL

SEQ ID NO: 7422 - protein, 9 aa, synthetic construct
GPGTVRISL

SEQ ID NO: 7423 - protein, 9 aa, synthetic construct
GPHFNPLSR

SEQ ID NO: 7424 - protein, 9 aa, synthetic construct
GPHPPWTEV

SEQ ID NO: 7425 - protein, 9 aa, synthetic construct
GPISYVVVM

SEQ ID NO: 7426 - protein, 9 aa, synthetic construct
GPLDKWRAL

SEQ ID NO: 7427 - protein, 9 aa, synthetic construct
GPLFRNSQL

SEQ ID NO: 7428 - protein, 9 aa, synthetic construct
GPLGSTIPM

SEQ ID NO: 7429 - protein, 11 aa, synthetic construct
GPLTELPDWSY

SEQ ID NO: 7430 - protein, 9 aa, synthetic construct
GPLYKNGSL

SEQ ID NO: 7431 - protein, 9 aa, synthetic construct
GPNVTKITL

SEQ ID NO: 7432 - protein, 10 aa, synthetic construct
GPPGTGKTLL

SEQ ID NO: 7433 - protein, 11 aa, synthetic construct
GPPKPLPAGRI

SEQ ID NO: 7434 - protein, 11 aa, synthetic construct
GPPPPPPGKPQ

SEQ ID NO: 7435 - protein, 9 aa, synthetic construct
GPREAFRQL

SEQ ID NO: 7436 - protein, 9 aa, synthetic construct
GPREALSRL

SEQ ID NO: 7437 - protein, 11 aa, synthetic construct
GPRFTLKLRSL

SEQ ID NO: 7438 - protein, 9 aa, synthetic construct
GPRHPVCLL

SEQ ID NO: 7439 - protein, 9 aa, synthetic construct
GPRKAGLIL

SEQ ID NO: 7440 - protein, 9 aa, synthetic construct
GPRLPWTRL

SEQ ID NO: 7441 - protein, 10 aa, synthetic construct
GPRPITQSEL

SEQ ID NO: 7442 - protein, 10 aa, synthetic construct
GPRSPSVIFM

SEQ ID NO: 7443 - protein, 9 aa, synthetic construct
GPRSSLRVL

SEQ ID NO: 7444 - protein, 11 aa, synthetic construct
GPRSTAGGVAL

SEQ ID NO: 7445 - protein, 9 aa, synthetic construct
GPSAPFSTL

SEQ ID NO: 7446 - protein, 9 aa, synthetic construct
GPSFKASSL

SEQ ID NO: 7447 - protein, 9 aa, synthetic construct
GPSPGSPTL

SEQ ID NO: 7448 - protein, 9 aa, synthetic construct
GPSSPWTQL

SEQ ID NO: 7449 - protein, 9 aa, synthetic construct
GPSVLRSTL

SEQ ID NO: 7450 - protein, 9 aa, synthetic construct
GPTNVRIEY

SEQ ID NO: 7451 - protein, 9 aa, synthetic construct
GPTQPPLSL

SEQ ID NO: 7452 - protein, 9 aa, synthetic construct
GPWVSTEVL

SEQ ID NO: 7453 - protein, 10 aa, synthetic construct
GPYDGFYLSY

SEQ ID NO: 7454 - protein, 10 aa, synthetic construct
GPYGGGGQYF

SEQ ID NO: 7455 - protein, 9 aa, synthetic construct
GPMVYAICY

SEQ ID NO: 7456 - protein, 10 aa, synthetic construct
GQDSSEIHFK

SEQ ID NO: 7457 - protein, 9 aa, synthetic construct
GQDMFRETI

SEQ ID NO: 7458 - protein, 8 aa, synthetic construct
GQFLIQQV

SEQ ID NO: 7459 - protein, 9 aa, synthetic construct
GQFNFVHVI

SEQ ID NO: 7460 - protein, 9 aa, synthetic construct
GQFPFYDSI

SEQ ID NO: 7461 - protein, 9 aa, synthetic construct
GQHTVLLVK

SEQ ID NO: 7462 - protein, 9 aa, synthetic construct
GQICRVTTV

SEQ ID NO: 7463 - protein, 8 aa, synthetic construct
GQIKLREI

SEQ ID NO: 7464 - protein, 8 aa, synthetic construct
GQILMPNI

SEQ ID NO: 7465 - protein, 10 aa, synthetic construct
GQILMPNIGY

SEQ ID NO: 7466 - protein, 9 aa, synthetic construct
GQIVVTTSI

SEQ ID NO: 7467 - protein, 9 aa, synthetic construct
GQKYMTAVV

SEQ ID NO: 7468 - protein, 8 aa, synthetic construct
GQLHVLRV

SEQ ID NO: 7469 - protein, 8 aa, synthetic construct
GQLKSLTI

SEQ ID NO: 7470 - protein, 9 aa, synthetic construct
GQLPEAPVI

SEQ ID NO: 7471 - protein, 9 aa, synthetic construct
GQLPNLQTV

SEQ ID NO: 7472 - protein, 11 aa, synthetic construct
GQNPTNAEVLK

SEQ ID NO: 7473 - protein, 8 aa, synthetic construct
GQPLALVV

SEQ ID NO: 7474 - protein, 9 aa, synthetic construct
GQRIQNVNV

SEQ ID NO: 7475 - protein, 9 aa, synthetic construct
GQRYFLNHI

SEQ ID NO: 7476 - protein, 8 aa, synthetic construct
GQTLFSTI

SEQ ID NO: 7477 - protein, 8 aa, synthetic construct
GQVCLPVI

SEQ ID NO: 7478 - protein, 8 aa, synthetic construct
GQVIIHNI

SEQ ID NO: 7479 - protein, 10 aa, synthetic construct
GQVITIGNER

SEQ ID NO: 7480 - protein, 8 aa, synthetic construct
GQVLSVCV

SEQ ID NO: 7481 - protein, 8 aa, synthetic construct
GQWEVKKI

SEQ ID NO: 7482 - protein, 8 aa, synthetic construct
GQYPLNGI

SEQ ID NO: 7483 - protein, 11 aa, synthetic construct
GRADALRVLSK

SEQ ID NO: 7484 - protein, 11 aa, synthetic construct
GRAFVNTRKDF

SEQ ID NO: 7485 - protein, 10 aa, synthetic construct
GRAPISNPGM

SEQ ID NO: 7486 - protein, 9 aa, synthetic construct
GRCLCQPEF

SEQ ID NO: 7487 - protein, 9 aa, synthetic construct
GRCPIIASL

SEQ ID NO: 7488 - protein, 9 aa, synthetic construct
GRCTLVTTL

SEQ ID NO: 7489 - protein, 11 aa, synthetic construct
GRCVICGGPGV

SEQ ID NO: 7490 - protein, 10 aa, synthetic construct
GRCVTCIYYL

SEQ ID NO: 7491 - protein, 9 aa, synthetic construct
GRCVVMVGM

SEQ ID NO: 7492 - protein, 10 aa, synthetic construct
GRDGYMGIGL

SEQ ID NO: 7493 - protein, 9 aa, synthetic construct
GRDLTDYLM

SEQ ID NO: 7494 - protein, 10 aa, synthetic construct
GRFAPQFSGY

SEQ ID NO: 7495 - protein, 10 aa, synthetic construct
GRFDEAYIYM

SEQ ID NO: 7496 - protein, 9 aa, synthetic construct
GRFDVKIEV

SEQ ID NO: 7497 - protein, 9 aa, synthetic construct
GRFDVRWIF

SEQ ID NO: 7498 - protein, 10 aa, synthetic construct
GRFEITVGPK

SEQ ID NO: 7499 - protein, 9 aa, synthetic construct
GRFEVGKKI

SEQ ID NO: 7500 - protein, 11 aa, synthetic construct
GRFEVGKKICL

SEQ ID NO: 7501 - protein, 10 aa, synthetic construct
GRFFSENSSL

SEQ ID NO: 7502 - protein, 9 aa, synthetic construct
GRFFWIVRV

SEQ ID NO: 7503 - protein, 10 aa, synthetic construct
GRFGGNPGGF

SEQ ID NO: 7504 - protein, 10 aa, synthetic construct
GRFGPLASVK

SEQ ID NO: 7505 - protein, 9 aa, synthetic construct
GRFGSGMNM

SEQ ID NO: 7506 - protein, 10 aa, synthetic construct
GRFGVERDRM

SEQ ID NO: 7507 - protein, 9 aa, synthetic construct
GRFHMYEGY

SEQ ID NO: 7508 - protein, 9 aa, synthetic construct
GRFKDVLVL

SEQ ID NO: 7509 - protein, 10 aa, synthetic construct
GRFKDVLVLL

SEQ ID NO: 7510 - protein, 9 aa, synthetic construct
GRFKLTETL

SEQ ID NO: 7511 - protein, 10 aa, synthetic construct
GRFSEPHARF

SEQ ID NO: 7512 - protein, 9 aa, synthetic construct
GRFSHRIYV

SEQ ID NO: 7513 - protein, 11 aa, synthetic construct
GRFSLPGATCL

SEQ ID NO: 7514 - protein, 10 aa, synthetic construct
GRFVPPALEK

SEQ ID NO: 7515 - protein, 11 aa, synthetic construct
GRFVPPALEKK

SEQ ID NO: 7516 - protein, 11 aa, synthetic construct
GRGVIPSTLAF

SEQ ID NO: 7517 - protein, 9 aa, synthetic construct
GRHEFTYAL

SEQ ID NO: 7518 - protein, 9 aa, synthetic construct
GRHEGVPTL

SEQ ID NO: 7519 - protein, 9 aa, synthetic construct
GRHPIGVLL

SEQ ID NO: 7520 - protein, 9 aa, synthetic construct
GRHSLYKML

SEQ ID NO: 7521 - protein, 9 aa, synthetic construct
GRHYCYPHF

SEQ ID NO: 7522 - protein, 9 aa, synthetic construct
GRHYWEVEV

SEQ ID NO: 7523 - protein, 10 aa, synthetic construct
GRIDIVENRF

SEQ ID NO: 7524 - protein, 9 aa, synthetic construct
GRIDKPILK

SEQ ID NO: 7525 - protein, 9 aa, synthetic construct
GRIDMVKGL

SEQ ID NO: 7526 - protein, 9 aa, synthetic construct
GRIDQVNQL

SEQ ID NO: 7527 - protein, 9 aa, synthetic construct
GRIDRKIEF

SEQ ID NO: 7528 - protein, 10 aa, synthetic construct
GRIDMVKGLL

SEQ ID NO: 7529 - protein, 9 aa, synthetic construct
GRIEILSGF

SEQ ID NO: 7530 - protein, 9 aa, synthetic construct
GRIELVQKL

SEQ ID NO: 7531 - protein, 9 aa, synthetic construct
GRIFIGTFK

SEQ ID NO: 7532 - protein, 10 aa, synthetic construct
GRIGNFIVKK

SEQ ID NO: 7533 - protein, 10 aa, synthetic construct
GRIKAIQLEY

SEQ ID NO: 7534 - protein, 10 aa, synthetic construct
GRIKEIFCPK

SEQ ID NO: 7535 - protein, 11 aa, synthetic construct
GRIKEVSVFTY

SEQ ID NO: 7536 - protein, 9 aa, synthetic construct
GRIKLLQGY

SEQ ID NO: 7537 - protein, 10 aa, synthetic construct
GRIKLQKALL

SEQ ID NO: 7538 - protein, 10 aa, synthetic construct
GRIKVNGIDY

SEQ ID NO: 7539 - protein, 9 aa, synthetic construct
GRILVGHAL

SEQ ID NO: 7540 - protein, 9 aa, synthetic construct
GRISIMQFF

SEQ ID NO: 7541 - protein, 11 aa, synthetic construct
GRKGVSHGQFF

SEQ ID NO: 7542 - protein, 9 aa, synthetic construct
GRLAAIVAK

SEQ ID NO: 7543 - protein, 11 aa, synthetic construct
GRLAAIVAKQV

SEQ ID NO: 7544 - protein, 11 aa, synthetic construct
GRLAHEVGWKY

SEQ ID NO: 7545 - protein, 9 aa, synthetic construct
GRLDAVLQR

SEQ ID NO: 7546 - protein, 9 aa, synthetic construct
GRLDLQYAK

SEQ ID NO: 7547 - protein, 9 aa, synthetic construct
GRLDQLIYI

SEQ ID NO: 7548 - protein, 9 aa, synthetic construct
GRLDYLSSL

SEQ ID NO: 7549 - protein, 9 aa, synthetic construct
GRLELQLRY

SEQ ID NO: 7550 - protein, 10 aa, synthetic construct
GRLELVNSRF

SEQ ID NO: 7551 - protein, 9 aa, synthetic construct
GRLGHILEY

SEQ ID NO: 7552 - protein, 9 aa, synthetic construct
GRLGSFHEL

SEQ ID NO: 7553 - protein, 9 aa, synthetic construct
GRLGYLNHV

SEQ ID NO: 7554 - protein, 9 aa, synthetic construct
GRLHLGHTF

SEQ ID NO: 7555 - protein, 9 aa, synthetic construct
GRLPRTYRL

SEQ ID NO: 7556 - protein, 10 aa, synthetic construct
GRLQLEACGM

SEQ ID NO: 7557 - protein, 10 aa, synthetic construct
GRLQLFGQDF

SEQ ID NO: 7558 - protein, 10 aa, synthetic construct
GRLQSLGKNF

SEQ ID NO: 7559 - protein, 9 aa, synthetic construct
GRLSHILEM

SEQ ID NO: 7560 - protein, 9 aa, synthetic construct
GRLVKDMKI

SEQ ID NO: 7561 - protein, 9 aa, synthetic construct
GRLVLSNKM

SEQ ID NO: 7562 - protein, 9 aa, synthetic construct
GRMVQVHEL

SEQ ID NO: 7563 - protein, 9 aa, synthetic construct
GRNALEIVM

SEQ ID NO: 7564 - protein, 9 aa, synthetic construct
GRNHYIPLV

SEQ ID NO: 7565 - protein, 9 aa, synthetic construct
GRNPIKIGY

SEQ ID NO: 7566 - protein, 9 aa, synthetic construct
GRQFLTQLM

SEQ ID NO: 7567 - protein, 10 aa, synthetic construct
GRSAFIGIGF

SEQ ID NO: 7568 - protein, 9 aa, synthetic construct
GRSCILVSI

SEQ ID NO: 7569 - protein, 9 aa, synthetic construct
GRSEVIYNY

SEQ ID NO: 7570 - protein, 9 aa, synthetic construct
GRSGYNYFF

SEQ ID NO: 7571 - protein, 9 aa, synthetic construct
GRSLIINHL

SEQ ID NO: 7572 - protein, 9 aa, synthetic construct
GRSLIKLNF

SEQ ID NO: 7573 - protein, 9 aa, synthetic construct
GRSLPRFQV

SEQ ID NO: 7574 - protein, 11 aa, synthetic construct
GRSTGEAFVQF

SEQ ID NO: 7575 - protein, 9 aa, synthetic construct
GRSYPVEVF

SEQ ID NO: 7576 - protein, 9 aa, synthetic construct
GRTDLLRLR

SEQ ID NO: 7577 - protein, 9 aa, synthetic construct
GRTELAIKL

SEQ ID NO: 7578 - protein, 9 aa, synthetic construct
GRTFIQPNM

SEQ ID NO: 7579 - protein, 9 aa, synthetic construct
GRTVLVIAH

SEQ ID NO: 7580 - protein, 10 aa, synthetic construct
GRTYLKYSIK

SEQ ID NO: 7581 - protein, 10 aa, synthetic construct
GRTYPVQEYF

SEQ ID NO: 7582 - protein, 10 aa, synthetic construct
GRVDFAYKFK

SEQ ID NO: 7583 - protein, 9 aa, synthetic construct
GRVFIIKSY

SEQ ID NO: 7584 - protein, 9 aa, synthetic construct
GRVFVLPCI

SEQ ID NO: 7585 - protein, 10 aa, synthetic construct
GRVGDVYIPR

SEQ ID NO: 7586 - protein, 9 aa, synthetic construct
GRVIHLSNL

SEQ ID NO: 7587 - protein, 10 aa, synthetic construct
GRVSLYQPKF

SEQ ID NO: 7588 - protein, 9 aa, synthetic construct
GRWEAAEGL

SEQ ID NO: 7589 - protein, 10 aa, synthetic construct
GRWPKKSAEF

SEQ ID NO: 7590 - protein, 9 aa, synthetic construct
GRYDGLVGM

SEQ ID NO: 7591 - protein, 10 aa, synthetic construct
GRYDKTQLRF

SEQ ID NO: 7592 - protein, 11 aa, synthetic construct
GRYDPSVKPPF

SEQ ID NO: 7593 - protein, 9 aa, synthetic construct
GRYEVAVPL

SEQ ID NO: 7594 - protein, 9 aa, synthetic construct
GRYFQNYSY

SEQ ID NO: 7595 - protein, 9 aa, synthetic construct
GRYGAISGF

SEQ ID NO: 7596 - protein, 11 aa, synthetic construct
GRYGAISGFGL

SEQ ID NO: 7597 - protein, 11 aa, synthetic construct
GRYGISGELAM

SEQ ID NO: 7598 - protein, 10 aa, synthetic construct
GRYLGKKVQF

SEQ ID NO: 7599 - protein, 9 aa, synthetic construct
GRYPGVSNY

SEQ ID NO: 7600 - protein, 9 aa, synthetic construct
GRYQVSWSL

SEQ ID NO: 7601 - protein, 11 aa, synthetic construct
GRYSQEPIKTF

SEQ ID NO: 7602 - protein, 9 aa, synthetic construct
GRYTGVRII

SEQ ID NO: 7603 - protein, 9 aa, synthetic construct
GRYTIKVLF

SEQ ID NO: 7604 - protein, 9 aa, synthetic construct
GRYTILIKY

SEQ ID NO: 7605 - protein, 10 aa, synthetic construct
GRMKFTRPLF

SEQ ID NO: 7606 - protein, 10 aa, synthetic construct
GRMNCVLATY

SEQ ID NO: 7607 - protein, 9 aa, synthetic construct
GSDCTTIHY

SEQ ID NO: 7608 - protein, 9 aa, synthetic construct
GSDDGVLAY

SEQ ID NO: 7609 - protein, 10 aa, synthetic construct
GSDEPAFMYY

SEQ ID NO: 7610 - protein, 9 aa, synthetic construct
GSDVVDWLY

SEQ ID NO: 7611 - protein, 9 aa, synthetic construct
GSFDVVHVK

SEQ ID NO: 7612 - protein, 11 aa, synthetic construct
GSGGIGYPYPR

SEQ ID NO: 7613 - protein, 10 aa, synthetic construct
GSGLGVGGGF

SEQ ID NO: 7614 - protein, 8 aa, synthetic construct
GSHSMRYF

SEQ ID NO: 7615 - protein, 10 aa, synthetic construct
GSIHDFPGFD

SEQ ID NO: 7616 - protein, 8 aa, synthetic construct
GSKLKVSL

SEQ ID NO: 7617 - protein, 9 aa, synthetic construct
GSLFLQTPK

SEQ ID NO: 7618 - protein, 9 aa, synthetic construct
GSLFLRTPK

SEQ ID NO: 7619 - protein, 10 aa, synthetic construct
GSLGGGFSSG

SEQ ID NO: 7620 - protein, 9 aa, synthetic construct
GSMEPAFHR

SEQ ID NO: 7621 - protein, 11 aa, synthetic construct
GSPLVVISQGK

SEQ ID NO: 7622 - protein, 9 aa, synthetic construct
GSSSFGGSY

SEQ ID NO: 7623 - protein, 9 aa, synthetic construct
GSVYITLKK

SEQ ID NO: 7624 - protein, 10 aa, synthetic construct
GSYNKVFLAK

SEQ ID NO: 7625 - protein, 9 aa, synthetic construct
GTADVHFER

SEQ ID NO: 7626 - protein, 9 aa, synthetic construct
GTAGIFATY

SEQ ID NO: 7627 - protein, 10 aa, synthetic construct
GTAIIQLPSK

SEQ ID NO: 7628 - protein, 9 aa, synthetic construct
GTAMIFTCF

SEQ ID NO: 7629 - protein, 9 aa, synthetic construct
GTCLLIANK

SEQ ID NO: 7630 - protein, 10 aa, synthetic construct
GTDDGRLLEY

SEQ ID NO: 7631 - protein, 9 aa, synthetic construct
GTDGHVHLY

SEQ ID NO: 7632 - protein, 8 aa, synthetic construct
GTDIQDNK

SEQ ID NO: 7633 - protein, 10 aa, synthetic construct
GTDWGEKGYY

SEQ ID NO: 7634 - protein, 9 aa, synthetic construct
GTDMEPSLY

SEQ ID NO: 7635 - protein, 10 aa, synthetic construct
GTEEAPKVFK

SEQ ID NO: 7636 - protein, 11 aa, synthetic construct
GTEFGGSIYQK

SEQ ID NO: 7637 - protein, 10 aa, synthetic construct
GTFDPDNLEK

SEQ ID NO: 7638 - protein, 9 aa, synthetic construct
GTFLEGVAK

SEQ ID NO: 7639 - protein, 8 aa, synthetic construct
GTFTKIFK

SEQ ID NO: 7640 - protein, 10 aa, synthetic construct
GTIAGLNVLR

SEQ ID NO: 7641 - protein, 9 aa, synthetic construct
GTIKDIVTR

SEQ ID NO: 7642 - protein, 10 aa, synthetic construct
GTKGPSNVFK

SEQ ID NO: 7643 - protein, 9 aa, synthetic construct
GTKLPGLLK

SEQ ID NO: 7644 - protein, 9 aa, synthetic construct
GTLDYILQR

SEQ ID NO: 7645 - protein, 10 aa, synthetic construct
GTLTDCVVMR

SEQ ID NO: 7646 - protein, 11 aa, synthetic construct
GTLTVEAPMPK

SEQ ID NO: 7647 - protein, 9 aa, synthetic construct
GTMTGMLYK

SEQ ID NO: 7648 - protein, 10 aa, synthetic construct
GTPLETIQKK

SEQ ID NO: 7649 - protein, 9 aa, synthetic construct
GTQSFVFQR

SEQ ID NO: 7650 - protein, 9 aa, synthetic construct
GTQYTFSSI

SEQ ID NO: 7651 - protein, 10 aa, synthetic construct
GTSDVEVNEK

SEQ ID NO: 7652 - protein, 9 aa, synthetic construct
GTTEWFHLK

SEQ ID NO: 7653 - protein, 10 aa, synthetic construct
GTVIHFNNPK

SEQ ID NO: 7654 - protein, 9 aa, synthetic construct
GTVLFEIKK

SEQ ID NO: 7655 - protein, 9 aa, synthetic construct
GTVSPLFQK

SEQ ID NO: 7656 - protein, 10 aa, synthetic construct
GTWKTPSFPK

SEQ ID NO: 7657 - protein, 9 aa, synthetic construct
GTYEFLYTV

SEQ ID NO: 7658 - protein, 10 aa, synthetic construct
GTMPLRNIFK

SEQ ID NO: 7659 - protein, 9 aa, synthetic construct
GVAFIFNQK

SEQ ID NO: 7660 - protein, 11 aa, synthetic construct
GVAGAVAVFPK

SEQ ID NO: 7661 - protein, 9 aa, synthetic construct
GVASGRLHL

SEQ ID NO: 7662 - protein, 10 aa, synthetic construct
GVDLTGPQLY

SEQ ID NO: 7663 - protein, 8 aa, synthetic construct
GVGPIRKV

SEQ ID NO: 7664 - protein, 9 aa, synthetic construct
GVIAEEEAY

SEQ ID NO: 7665 - protein, 9 aa, synthetic construct
GVIEDHSNR

SEQ ID NO: 7666 - protein, 9 aa, synthetic construct
GVIEENEVY

SEQ ID NO: 7667 - protein, 11 aa, synthetic construct
GVIGLLEPMKK

SEQ ID NO: 7668 - protein, 11 aa, synthetic construct
GVIGQDGLLFK

SEQ ID NO: 7669 - protein, 9 aa, synthetic construct
GVIPSTLAF

SEQ ID NO: 7670 - protein, 11 aa, synthetic construct
GVISNHLILNK

SEQ ID NO: 7671 - protein, 9 aa, synthetic construct
GVIVHIIEK

SEQ ID NO: 7672 - protein, 9 aa, synthetic construct
GVLGVVTGV

SEQ ID NO: 7673 - protein, 8 aa, synthetic construct
GVLHVGQK

SEQ ID NO: 7674 - protein, 8 aa, synthetic construct
GVLKEKPL

SEQ ID NO: 7675 - protein, 9 aa, synthetic construct
GVLPNIQAV

SEQ ID NO: 7676 - protein, 9 aa, synthetic construct
GVMPSHFSR

SEQ ID NO: 7677 - protein, 10 aa, synthetic construct
GVMRIGLVAK

SEQ ID NO: 7678 - protein, 9 aa, synthetic construct
GVMTVLIKR

SEQ ID NO: 7679 - protein, 10 aa, synthetic construct
GVPEFISVGY

SEQ ID NO: 7680 - protein, 9 aa, synthetic construct
GVRPVSGDL

SEQ ID NO: 7681 - protein, 11 aa, synthetic construct
GVSVDSQFTHL

SEQ ID NO: 7682 - protein, 9 aa, synthetic construct
GVMDYYLKY

SEQ ID NO: 7683 - protein, 9 aa, synthetic construct
GVMESVIAL

SEQ ID NO: 7684 - protein, 10 aa, synthetic construct
GYALPHAILR

SEQ ID NO: 7685 - protein, 8 aa, synthetic construct
GYDYHDYR

SEQ ID NO: 7686 - protein, 11 aa, synthetic construct
GYIKGIFGFRS

SEQ ID NO: 7687 - protein, 9 aa, synthetic construct
GYLHIQMHL

SEQ ID NO: 7688 - protein, 8 aa, synthetic construct
GYLKGYTL

SEQ ID NO: 7689 - protein, 9 aa, synthetic construct
GYPGGIHEV

SEQ ID NO: 7690 - protein, 9 aa, synthetic construct
GYSEHFVEF

SEQ ID NO: 7691 - protein, 8 aa, synthetic construct
GYVTHLMK

SEQ ID NO: 7692 - protein, 8 aa, synthetic construct
GMFKIARV

SEQ ID NO: 7693 - protein, 9 aa, synthetic construct
GMIRHYVSI

SEQ ID NO: 7694 - protein, 9 aa, synthetic construct
GMLDGLVNV

SEQ ID NO: 7695 - protein, 8 aa, synthetic construct
GMPDPHLY

SEQ ID NO: 7696 - protein, 9 aa, synthetic construct
GMYDGSALI

SEQ ID NO: 7697 - protein, 9 aa, synthetic construct
GMYETPLFL

SEQ ID NO: 7698 - protein, 8 aa, synthetic construct
GMYPGVLV

SEQ ID NO: 7699 - protein, 9 aa, synthetic construct
HAAGFAYTY

SEQ ID NO: 7700 - protein, 9 aa, synthetic construct
HAAHIISEL

SEQ ID NO: 7701 - protein, 9 aa, synthetic construct
HAAVDRWQY

SEQ ID NO: 7702 - protein, 9 aa, synthetic construct
HACGVIATI

SEQ ID NO: 7703 - protein, 11 aa, synthetic construct
HACGVIATIAF

SEQ ID NO: 7704 - protein, 9 aa, synthetic construct
HADGTIVRY

SEQ ID NO: 7705 - protein, 10 aa, synthetic construct
HADIVSCVAM

SEQ ID NO: 7706 - protein, 10 aa, synthetic construct
HAEASAIVEY

SEQ ID NO: 7707 - protein, 9 aa, synthetic construct
HAFEIIHLL

SEQ ID NO: 7708 - protein, 8 aa, synthetic construct
HAFLKTEF

SEQ ID NO: 7709 - protein, 9 aa, synthetic construct
HAFVDLHEF

SEQ ID NO: 7710 - protein, 9 aa, synthetic construct
HAFVELHEF

SEQ ID NO: 7711 - protein, 8 aa, synthetic construct
HAGLVYEY

SEQ ID NO: 7712 - protein, 9 aa, synthetic construct
HAHLDIEAF

SEQ ID NO: 7713 - protein, 10 aa, synthetic construct
HAHQFLQNEY

SEQ ID NO: 7714 - protein, 11 aa, synthetic construct
HAHSEQLQALY

SEQ ID NO: 7715 - protein, 9 aa, synthetic construct
HAIDIICGF

SEQ ID NO: 7716 - protein, 9 aa, synthetic construct
HAIEESVVL

SEQ ID NO: 7717 - protein, 11 aa, synthetic construct
HAIIDEQPLIF

SEQ ID NO: 7718 - protein, 8 aa, synthetic construct
HAKTKVLL

SEQ ID NO: 7719 - protein, 9 aa, synthetic construct
HALFEISKY

SEQ ID NO: 7720 - protein, 10 aa, synthetic construct
HALSLPAESY

SEQ ID NO: 7721 - protein, 9 aa, synthetic construct
HAPFTATSL

SEQ ID NO: 7722 - protein, 9 aa, synthetic construct
HAQKEHLYF

SEQ ID NO: 7723 - protein, 9 aa, synthetic construct
HARTITVAL

SEQ ID NO: 7724 - protein, 9 aa, synthetic construct
HASDRIIAL

SEQ ID NO: 7725 - protein, 9 aa, synthetic construct
HASNLVKLV

SEQ ID NO: 7726 - protein, 9 aa, synthetic construct
HATNVGIMF

SEQ ID NO: 7727 - protein, 9 aa, synthetic construct
HATTALLHY

SEQ ID NO: 7728 - protein, 11 aa, synthetic construct
HATVATENEVF

SEQ ID NO: 7729 - protein, 9 aa, synthetic construct
HAVFVQSYY

SEQ ID NO: 7730 - protein, 11 aa, synthetic construct
HAVGDIPGVRF

SEQ ID NO: 7731 - protein, 11 aa, synthetic construct
HAVYRDDLKKL

SEQ ID NO: 7732 - protein, 11 aa, synthetic construct
HAYDGKDYISL

SEQ ID NO: 7733 - protein, 9 aa, synthetic construct
HAYIHSVQF

SEQ ID NO: 7734 - protein, 9 aa, synthetic construct
HCLEHLVQY

SEQ ID NO: 7735 - protein, 9 aa, synthetic construct
HEATLRCWA

SEQ ID NO: 7736 - protein, 9 aa, synthetic construct
HEFDFIHDV

SEQ ID NO: 7737 - protein, 10 aa, synthetic construct
HEFEEATNLL

SEQ ID NO: 7738 - protein, 9 aa, synthetic construct
HEFLHEVPA

SEQ ID NO: 7739 - protein, 9 aa, synthetic construct
HEFVLQNHA

SEQ ID NO: 7740 - protein, 8 aa, synthetic construct
HEKPKYVL

SEQ ID NO: 7741 - protein, 9 aa, synthetic construct
HETPVEVEL

SEQ ID NO: 7742 - protein, 9 aa, synthetic construct
HEVLTEVVP

SEQ ID NO: 7743 - protein, 9 aa, synthetic construct
HEYFALQHA

SEQ ID NO: 7744 - protein, 10 aa, synthetic construct
HEYPHFSHRP

SEQ ID NO: 7745 - protein, 9 aa, synthetic construct
HEYPWILSA

SEQ ID NO: 7746 - protein, 9 aa, synthetic construct
HFDDTVVCL

SEQ ID NO: 7747 - protein, 9 aa, synthetic construct
HFDNLFSKM

SEQ ID NO: 7748 - protein, 8 aa, synthetic construct
HFDVTVKM

SEQ ID NO: 7749 - protein, 9 aa, synthetic construct
HFIAEHYMF

SEQ ID NO: 7750 - protein, 10 aa, synthetic construct
HGDSDLQLDR

SEQ ID NO: 7751 - protein, 8 aa, synthetic construct
HGFLRQAL

SEQ ID NO: 7752 - protein, 9 aa, synthetic construct
HGHIRISDL

SEQ ID NO: 7753 - protein, 9 aa, synthetic construct
HGHQRPVAF

SEQ ID NO: 7754 - protein, 9 aa, synthetic construct
HGIIRTLDL

SEQ ID NO: 7755 - protein, 9 aa, synthetic construct
HGKPRLVRF

SEQ ID NO: 7756 - protein, 8 aa, synthetic construct
HGLFKSTL

SEQ ID NO: 7757 - protein, 9 aa, synthetic construct
HGLIRKYGL

SEQ ID NO: 7758 - protein, 8 aa, synthetic construct
HGLLLPHI

SEQ ID NO: 7759 - protein, 9 aa, synthetic construct
HGLVEVASY

SEQ ID NO: 7760 - protein, 8 aa, synthetic construct
HGVILPRV

SEQ ID NO: 7761 - protein, 8 aa, synthetic construct
HGYKKYLL

SEQ ID NO: 7762 - protein, 9 aa, synthetic construct
HHHAGYEQF

SEQ ID NO: 7763 - protein, 9 aa, synthetic construct
HHTFYNELR

SEQ ID NO: 7764 - protein, 8 aa, synthetic construct
HIADLAGN

SEQ ID NO: 7765 - protein, 8 aa, synthetic construct
HIAGILAR

SEQ ID NO: 7766 - protein, 9 aa, synthetic construct
HICAVVVEY

SEQ ID NO: 7767 - protein, 8 aa, synthetic construct
HIFLRTTL

SEQ ID NO: 7768 - protein, 9 aa, synthetic construct
HIHVRISHL

SEQ ID NO: 7769 - protein, 9 aa, synthetic construct
HIIENIVAV

SEQ ID NO: 7770 - protein, 9 aa, synthetic construct
HIIGRIESY

SEQ ID NO: 7771 - protein, 9 aa, synthetic construct
HIKTHELHL

SEQ ID NO: 7772 - protein, 9 aa, synthetic construct
HIMEIFSTY

SEQ ID NO: 7773 - protein, 8 aa, synthetic construct
HIRHKFFL

SEQ ID NO: 7774 - protein, 8 aa, synthetic construct
HISKKWGF

SEQ ID NO: 7775 - protein, 8 aa, synthetic construct
HIVEKRVL

SEQ ID NO: 7776 - protein, 10 aa, synthetic construct
HIWESDSNEF

SEQ ID NO: 7777 - protein, 9 aa, synthetic construct
HIYTKPLVL

SEQ ID NO: 7778 - protein, 8 aa, synthetic construct
HLAAVAHK

SEQ ID NO: 7779 - protein, 9 aa, synthetic construct
HLDLGILYY

SEQ ID NO: 7780 - protein, 11 aa, synthetic construct
HLDVTALCHKI

SEQ ID NO: 7781 - protein, 9 aa, synthetic construct
HLEARLQSL

SEQ ID NO: 7782 - protein, 8 aa, synthetic construct
HLEINPDH

SEQ ID NO: 7783 - protein, 9 aa, synthetic construct
HLGDFLVFL

SEQ ID NO: 7784 - protein, 9 aa, synthetic construct
HLGLLKAKL

SEQ ID NO: 7785 - protein, 9 aa, synthetic construct
HLGLLKARL

SEQ ID NO: 7786 - protein, 10 aa, synthetic construct
HLHESCVLSL

SEQ ID NO: 7787 - protein, 8 aa, synthetic construct
HLHIKIKL

SEQ ID NO: 7788 - protein, 10 aa, synthetic construct
HLHNMPPSAL

SEQ ID NO: 7789 - protein, 9 aa, synthetic construct
HLHVHFTAL

SEQ ID NO: 7790 - protein, 8 aa, synthetic construct
HLILKTTF

SEQ ID NO: 7791 - protein, 10 aa, synthetic construct
HLIPAANTGE

SEQ ID NO: 7792 - protein, 8 aa, synthetic construct
HLITKPVL

SEQ ID NO: 7793 - protein, 9 aa, synthetic construct
HLKALTSEL

SEQ ID NO: 7794 - protein, 9 aa, synthetic construct
HLKKVYASF

SEQ ID NO: 7795 - protein, 9 aa, synthetic construct
HLKLGEVSV

SEQ ID NO: 7796 - protein, 9 aa, synthetic construct
HLKPISREL

SEQ ID NO: 7797 - protein, 9 aa, synthetic construct
HLLFRGQLL

SEQ ID NO: 7798 - protein, 8 aa, synthetic construct
HLLIKRSL

SEQ ID NO: 7799 - protein, 9 aa, synthetic construct
HLLLKQGKL

SEQ ID NO: 7800 - protein, 9 aa, synthetic construct
HLNLRKIAL

SEQ ID NO: 7801 - protein, 10 aa, synthetic construct
HLPLLPNVSY

SEQ ID NO: 7802 - protein, 8 aa, synthetic construct
HLQLREVL

SEQ ID NO: 7803 - protein, 9 aa, synthetic construct
HLQNRLIAT

SEQ ID NO: 7804 - protein, 9 aa, synthetic construct
HLRVKPRVI

SEQ ID NO: 7805 - protein, 9 aa, synthetic construct
HLTDITLKV

SEQ ID NO: 7806 - protein, 9 aa, synthetic construct
HLYARQLTL

SEQ ID NO: 7807 - protein, 10 aa, synthetic construct
HLYPNTPYAY

SEQ ID NO: 7808 - protein, 8 aa, synthetic construct
HNCPKPVL

SEQ ID NO: 7809 - protein, 8 aa, synthetic construct
HNFIKVTL

SEQ ID NO: 7810 - protein, 8 aa, synthetic construct
HNFVKIAL

SEQ ID NO: 7811 - protein, 8 aa, synthetic construct
HNKLGWVL

SEQ ID NO: 7812 - protein, 11 aa, synthetic construct
HPAEVKSLIQY

SEQ ID NO: 7813 - protein, 11 aa, synthetic construct
HPASVLSQPQY

SEQ ID NO: 7814 - protein, 9 aa, synthetic construct
HPCFIIAEI

SEQ ID NO: 7815 - protein, 10 aa, synthetic construct
HPDAPMSQVY

SEQ ID NO: 7816 - protein, 11 aa, synthetic construct
HPDASVNFSEF

SEQ ID NO: 7817 - protein, 10 aa, synthetic construct
HPDEKSIITY

SEQ ID NO: 7818 - protein, 8 aa, synthetic construct
HPDLGTDK

SEQ ID NO: 7819 - protein, 9 aa, synthetic construct
HPDTGISSK

SEQ ID NO: 7820 - protein, 9 aa, synthetic construct
HPEIDNPEY

SEQ ID NO: 7821 - protein, 9 aa, synthetic construct
HPEKLATVL

SEQ ID NO: 7822 - protein, 9 aa, synthetic construct
HPFAPPICF

SEQ ID NO: 7823 - protein, 9 aa, synthetic construct
HPFFESVTW

SEQ ID NO: 7824 - protein, 9 aa, synthetic construct
HPFFGRVVL

SEQ ID NO: 7825 - protein, 9 aa, synthetic construct
HPFKIFTKM

SEQ ID NO: 7826 - protein, 9 aa, synthetic construct
HPFLQRQQL

SEQ ID NO: 7827 - protein, 9 aa, synthetic construct
HPFLTALKY

SEQ ID NO: 7828 - protein, 10 aa, synthetic construct
HPFPESKPVL

SEQ ID NO: 7829 - protein, 10 aa, synthetic construct
HPFYDCQTDF

SEQ ID NO: 7830 - protein, 11 aa, synthetic construct
HPGPCPPCPAF

SEQ ID NO: 7831 - protein, 9 aa, synthetic construct
HPGSSALHY

SEQ ID NO: 7832 - protein, 10 aa, synthetic construct
HPGYFGKVGM

SEQ ID NO: 7833 - protein, 9 aa, synthetic construct
HPHDLVILM

SEQ ID NO: 7834 - protein, 9 aa, synthetic construct
HPHLVAEAF

SEQ ID NO: 7835 - protein, 9 aa, synthetic construct
HPHLVAEAY

SEQ ID NO: 7836 - protein, 9 aa, synthetic construct
HPHPEDIKF

SEQ ID NO: 7837 - protein, 10 aa, synthetic construct
HPIEGSTTVF

SEQ ID NO: 7838 - protein, 9 aa, synthetic construct
HPIRLFCRY

SEQ ID NO: 7839 - protein, 10 aa, synthetic construct
HPISDHEATL

SEQ ID NO: 7840 - protein, 11 aa, synthetic construct
HPISDHEATLR

SEQ ID NO: 7841 - protein, 9 aa, synthetic construct
HPIYNIKSL

SEQ ID NO: 7842 - protein, 8 aa, synthetic construct
HPKAKLVL

SEQ ID NO: 7843 - protein, 11 aa, synthetic construct
HPKDIRESDYF

SEQ ID NO: 7844 - protein, 9 aa, synthetic construct
HPKENIIAV

SEQ ID NO: 7845 - protein, 11 aa, synthetic construct
HPLDPIDTVDF

SEQ ID NO: 7846 - protein, 11 aa, synthetic construct
HPLPETAVRGY

SEQ ID NO: 7847 - protein, 10 aa, synthetic construct
HPLSLTSDQY

SEQ ID NO: 7848 - protein, 10 aa, synthetic construct
HPLYPFNDPY

SEQ ID NO: 7849 - protein, 9 aa, synthetic construct
HPLYTPPTY

SEQ ID NO: 7850 - protein, 9 aa, synthetic construct
HPNDDDVHF

SEQ ID NO: 7851 - protein, 9 aa, synthetic construct
HPNGLQVMY

SEQ ID NO: 7852 - protein, 9 aa, synthetic construct
HPNLDKLGY

SEQ ID NO: 7853 - protein, 10 aa, synthetic construct
HPNLVVGGTY

SEQ ID NO: 7854 - protein, 9 aa, synthetic construct
HPNPIPSGL

SEQ ID NO: 7855 - protein, 11 aa, synthetic construct
HPNVITLHEVY

SEQ ID NO: 7856 - protein, 10 aa, synthetic construct
HPPPHLKTQL

SEQ ID NO: 7857 - protein, 9 aa, synthetic construct
HPQFVTDVM

SEQ ID NO: 7858 - protein, 9 aa, synthetic construct
HPQIIIRAF

SEQ ID NO: 7859 - protein, 9 aa, synthetic construct
HPQPTQVQF

SEQ ID NO: 7860 - protein, 9 aa, synthetic construct
HPQQPPVQY

SEQ ID NO: 7861 - protein, 8 aa, synthetic construct
HPRAPVLL

SEQ ID NO: 7862 - protein, 9 aa, synthetic construct
HPRAYFMQL

SEQ ID NO: 7863 - protein, 9 aa, synthetic construct
HPRDFFSRL

SEQ ID NO: 7864 - protein, 9 aa, synthetic construct
HPRDPNLLL

SEQ ID NO: 7865 - protein, 9 aa, synthetic construct
HPRDVYSNL

SEQ ID NO: 7866 - protein, 10 aa, synthetic construct
HPRIASGLGL

SEQ ID NO: 7867 - protein, 9 aa, synthetic construct
HPRIITEGF

SEQ ID NO: 7868 - protein, 9 aa, synthetic construct
HPRTSITVV

SEQ ID NO: 7869 - protein, 10 aa, synthetic construct
HPRTSITVVL

SEQ ID NO: 7870 - protein, 9 aa, synthetic construct
HPRVGDLIL

SEQ ID NO: 7871 - protein, 9 aa, synthetic construct
HPRYLIPEL

SEQ ID NO: 7872 - protein, 9 aa, synthetic construct
HPRMVILRL

SEQ ID NO: 7873 - protein, 11 aa, synthetic construct
HPSEKALIVHY

SEQ ID NO: 7874 - protein, 9 aa, synthetic construct
HPSLPASSL

SEQ ID NO: 7875 - protein, 9 aa, synthetic construct
HPSLQPEEY

SEQ ID NO: 7876 - protein, 11 aa, synthetic construct
HPTDITSLDQY

SEQ ID NO: 7877 - protein, 9 aa, synthetic construct
HPTGKMFIL

SEQ ID NO: 7878 - protein, 10 aa, synthetic construct
HPTLGPKITY

SEQ ID NO: 7879 - protein, 9 aa, synthetic construct
HPTLIQRTY

SEQ ID NO: 7880 - protein, 9 aa, synthetic construct
HPTVIGESM

SEQ ID NO: 7881 - protein, 10 aa, synthetic construct
HPTVIGESMY

SEQ ID NO: 7882 - protein, 11 aa, synthetic construct
HPVAERLDILM

SEQ ID NO: 7883 - protein, 9 aa, synthetic construct
HPVKIGDLF

SEQ ID NO: 7884 - protein, 10 aa, synthetic construct
HPVRDPVHMY

SEQ ID NO: 7885 - protein, 11 aa, synthetic construct
HPVSFDKACEF

SEQ ID NO: 7886 - protein, 11 aa, synthetic construct
HPVSSITGQDF

SEQ ID NO: 7887 - protein, 9 aa, synthetic construct
HPVVGDLTY

SEQ ID NO: 7888 - protein, 11 aa, synthetic construct
HPVVHPLDLKY

SEQ ID NO: 7889 - protein, 10 aa, synthetic construct
HPWEVMPDLY

SEQ ID NO: 7890 - protein, 10 aa, synthetic construct
HPWFGMEQEY

SEQ ID NO: 7891 - protein, 9 aa, synthetic construct
HPWSRKVAF

SEQ ID NO: 7892 - protein, 11 aa, synthetic construct
HPYEVAEVIAL

SEQ ID NO: 7893 - protein, 11 aa, synthetic construct
HPYLDEGRLRY

SEQ ID NO: 7894 - protein, 9 aa, synthetic construct
HPYNKLWSL

SEQ ID NO: 7895 - protein, 9 aa, synthetic construct
HPYQFLLKY

SEQ ID NO: 7896 - protein, 9 aa, synthetic construct
HPYQPDPKM

SEQ ID NO: 7897 - protein, 9 aa, synthetic construct
HQATFRLNV

SEQ ID NO: 7898 - protein, 8 aa, synthetic construct
HQEVLREI

SEQ ID NO: 7899 - protein, 8 aa, synthetic construct
HQFLQYHV

SEQ ID NO: 7900 - protein, 8 aa, synthetic construct
HQFSTLRI

SEQ ID NO: 7901 - protein, 8 aa, synthetic construct
HQFYPTVV

SEQ ID NO: 7902 - protein, 9 aa, synthetic construct
HQIFHVLVV

SEQ ID NO: 7903 - protein, 8 aa, synthetic construct
HQINLIKV

SEQ ID NO: 7904 - protein, 9 aa, synthetic construct
HQITVLHVY

SEQ ID NO: 7905 - protein, 9 aa, synthetic construct
HQKGGIPNV

SEQ ID NO: 7906 - protein, 9 aa, synthetic construct
HQKSILTQI

SEQ ID NO: 7907 - protein, 8 aa, synthetic construct
HQLSLRTV

SEQ ID NO: 7908 - protein, 8 aa, synthetic construct
HQLVIQKL

SEQ ID NO: 7909 - protein, 8 aa, synthetic construct
HQLYVLQV

SEQ ID NO: 7910 - protein, 9 aa, synthetic construct
HQNVFPNHI

SEQ ID NO: 7911 - protein, 8 aa, synthetic construct
HQRITEEL

SEQ ID NO: 7912 - protein, 8 aa, synthetic construct
HQRLQPLF

SEQ ID NO: 7913 - protein, 8 aa, synthetic construct
HQWFGNLV

SEQ ID NO: 7914 - protein, 9 aa, synthetic construct
HQYFHICFV

SEQ ID NO: 7915 - protein, 9 aa, synthetic construct
HQYHALPAT

SEQ ID NO: 7916 - protein, 8 aa, synthetic construct
HQYYQHIV

SEQ ID NO: 7917 - protein, 9 aa, synthetic construct
HRAVFPIYL

SEQ ID NO: 7918 - protein, 10 aa, synthetic construct
HRFPSPLAPR

SEQ ID NO: 7919 - protein, 9 aa, synthetic construct
HRFQTQQLL

SEQ ID NO: 7920 - protein, 9 aa, synthetic construct
HRFYMIQSF

SEQ ID NO: 7921 - protein, 10 aa, synthetic construct
HRFYPDKIDY

SEQ ID NO: 7922 - protein, 9 aa, synthetic construct
HRFYMFHSF

SEQ ID NO: 7923 - protein, 9 aa, synthetic construct
HRHALRLLI

SEQ ID NO: 7924 - protein, 10 aa, synthetic construct
HRHEGVFICR

SEQ ID NO: 7925 - protein, 9 aa, synthetic construct
HRIDLKTKI

SEQ ID NO: 7926 - protein, 10 aa, synthetic construct
HRLGIEGLSL

SEQ ID NO: 7927 - protein, 9 aa, synthetic construct
HRLGLFYQL

SEQ ID NO: 7928 - protein, 9 aa, synthetic construct
HRLNFFVEV

SEQ ID NO: 7929 - protein, 9 aa, synthetic construct
HRNELQMQL

SEQ ID NO: 7930 - protein, 9 aa, synthetic construct
HRNEVTVEL

SEQ ID NO: 7931 - protein, 9 aa, synthetic construct
HRNSMKVFL

SEQ ID NO: 7932 - protein, 9 aa, synthetic construct
HRQSIVVSF

SEQ ID NO: 7933 - protein, 9 aa, synthetic construct
HRVALSVQL

SEQ ID NO: 7934 - protein, 9 aa, synthetic construct
HRVLIFTQM

SEQ ID NO: 7935 - protein, 9 aa, synthetic construct
HRYPNQVYY

SEQ ID NO: 7936 - protein, 9 aa, synthetic construct
HSDPESDFY

SEQ ID NO: 7937 - protein, 9 aa, synthetic construct
HSDPSILGY

SEQ ID NO: 7938 - protein, 9 aa, synthetic construct
HSEAHTLLY

SEQ ID NO: 7939 - protein, 9 aa, synthetic construct
HSEYHTLLY

SEQ ID NO: 7940 - protein, 9 aa, synthetic construct
HSFIFFNKV

SEQ ID NO: 7941 - protein, 8 aa, synthetic construct
HSIIETLR

SEQ ID NO: 7942 - protein, 8 aa, synthetic construct
HSIQIMKV

SEQ ID NO: 7943 - protein, 9 aa, synthetic construct
HSLAFVVRI

SEQ ID NO: 7944 - protein, 11 aa, synthetic construct
HSQFIGYPITL

SEQ ID NO: 7945 - protein, 9 aa, synthetic construct
HSVLIHEYY

SEQ ID NO: 7946 - protein, 8 aa, synthetic construct
HSVTVPLV

SEQ ID NO: 7947 - protein, 8 aa, synthetic construct
HSYLSRLI

SEQ ID NO: 7948 - protein, 8 aa, synthetic construct
HSYSPRAI

SEQ ID NO: 7949 - protein, 9 aa, synthetic construct
HTAHIACKF

SEQ ID NO: 7950 - protein, 9 aa, synthetic construct
HTAPNVPHY

SEQ ID NO: 7951 - protein, 10 aa, synthetic construct
HTDDPLTWDY

SEQ ID NO: 7952 - protein, 9 aa, synthetic construct
HTDILKEKY

SEQ ID NO: 7953 - protein, 9 aa, synthetic construct
HTDVGLLEY

SEQ ID NO: 7954 - protein, 9 aa, synthetic construct
HTEERLLRY

SEQ ID NO: 7955 - protein, 8 aa, synthetic construct
HTFYNELR

SEQ ID NO: 7956 - protein, 11 aa, synthetic construct
HTGPGLLSMAN

SEQ ID NO: 7957 - protein, 8 aa, synthetic construct
HTIMRNIL

SEQ ID NO: 7958 - protein, 9 aa, synthetic construct
HTKTTLPTF

SEQ ID NO: 7959 - protein, 9 aa, synthetic construct
HTTSRLAFY

SEQ ID NO: 7960 - protein, 9 aa, synthetic construct
HTVPIYEGY

SEQ ID NO: 7961 - protein, 9 aa, synthetic construct
HVAQIYAIR

SEQ ID NO: 7962 - protein, 9 aa, synthetic construct
HVGYTLSYK

SEQ ID NO: 7963 - protein, 10 aa, synthetic construct
HVHLHVLGGR

SEQ ID NO: 7964 - protein, 9 aa, synthetic construct
HVIDVKFLY

SEQ ID NO: 7965 - protein, 9 aa, synthetic construct
HVITKTMEL

SEQ ID NO: 7966 - protein, 9 aa, synthetic construct
HVKVLNTSL

SEQ ID NO: 7967 - protein, 11 aa, synthetic construct
HVLIDVGTGYY

SEQ ID NO: 7968 - protein, 10 aa, synthetic construct
HVPNFIFDEF

SEQ ID NO: 7969 - protein, 9 aa, synthetic construct
HYDAVEAEL

SEQ ID NO: 7970 - protein, 10 aa, synthetic construct
HYGFQLYQSD

SEQ ID NO: 7971 - protein, 9 aa, synthetic construct
HYLPVKIIL

SEQ ID NO: 7972 - protein, 9 aa, synthetic construct
IAAHGNSLR

SEQ ID NO: 7973 - protein, 9 aa, synthetic construct
IAAPFTSKL

SEQ ID NO: 7974 - protein, 9 aa, synthetic construct
IACIESHQF

SEQ ID NO: 7975 - protein, 9 aa, synthetic construct
IADGGFTEL

SEQ ID NO: 7976 - protein, 8 aa, synthetic construct
IADISQVY

SEQ ID NO: 7977 - protein, 9 aa, synthetic construct
IADMGHLKY

SEQ ID NO: 7978 - protein, 9 aa, synthetic construct
IAEEGVDSL

SEQ ID NO: 7979 - protein, 10 aa, synthetic construct
IAEGHTKAVL

SEQ ID NO: 7980 - protein, 11 aa, synthetic construct
IAFEHPEEVDY

SEQ ID NO: 7981 - protein, 9 aa, synthetic construct
IAIIPSKKL

SEQ ID NO: 7982 - protein, 10 aa, synthetic construct
IAIKPDGVQR

SEQ ID NO: 7983 - protein, 8 aa, synthetic construct
IAKLMVEL

SEQ ID NO: 7984 - protein, 9 aa, synthetic construct
IALEQTEEY

SEQ ID NO: 7985 - protein, 9 aa, synthetic construct
IANPNVPAY

SEQ ID NO: 7986 - protein, 8 aa, synthetic construct
IANYRPTL

SEQ ID NO: 7987 - protein, 9 aa, synthetic construct
IAPEGSLVF

SEQ ID NO: 7988 - protein, 9 aa, synthetic construct
IAPGSQTVL

SEQ ID NO: 7989 - protein, 9 aa, synthetic construct
IAPKMLVNL

SEQ ID NO: 7990 - protein, 9 aa, synthetic construct
IAPLGCVSV

SEQ ID NO: 7991 - protein, 8 aa, synthetic construct
IAPVGESL

SEQ ID NO: 7992 - protein, 8 aa, synthetic construct
IARLKEVL

SEQ ID NO: 7993 - protein, 9 aa, synthetic construct
IARLPSSTL

SEQ ID NO: 7994 - protein, 9 aa, synthetic construct
IARNLTQQL

SEQ ID NO: 7995 - protein, 9 aa, synthetic construct
IASDIVSRF

SEQ ID NO: 7996 - protein, 9 aa, synthetic construct
IATALEYVY

SEQ ID NO: 7997 - protein, 9 aa, synthetic construct
IATEITAKF

SEQ ID NO: 7998 - protein, 9 aa, synthetic construct
IAVGHIYFF

SEQ ID NO: 7999 - protein, 9 aa, synthetic construct
IAVGHIYYF

SEQ ID NO: 8000 - protein, 9 aa, synthetic construct
IAVGLVPQY

SEQ ID NO: 8001 - protein, 11 aa, synthetic construct
IAVHSQDITIP

SEQ ID NO: 8002 - protein, 9 aa, synthetic construct
IAWESDLQF

SEQ ID NO: 8003 - protein, 9 aa, synthetic construct
IAYSRPVYF

SEQ ID NO: 8004 - protein, 9 aa, synthetic construct
IAMESITVY

SEQ ID NO: 8005 - protein, 9 aa, synthetic construct
ICHVVGITY

SEQ ID NO: 8006 - protein, 9 aa, synthetic construct
IDDLKNQIL

SEQ ID NO: 8007 - protein, 10 aa, synthetic construct
IDEMPEAAVK

SEQ ID NO: 8008 - protein, 8 aa, synthetic construct
IDHIFASK

SEQ ID NO: 8009 - protein, 9 aa, synthetic construct
IDHYVGIAR

SEQ ID NO: 8010 - protein, 10 aa, synthetic construct
IDLGQSIDMK

SEQ ID NO: 8011 - protein, 11 aa, synthetic construct
IDLHSPSEIVK

SEQ ID NO: 8012 - protein, 9 aa, synthetic construct
IDQDARDLY

SEQ ID NO: 8013 - protein, 9 aa, synthetic construct
IDRLFDTSA

SEQ ID NO: 8014 - protein, 9 aa, synthetic construct
IDTKGVTAL

SEQ ID NO: 8015 - protein, 8 aa, synthetic construct
IDVNHYAK

SEQ ID NO: 8016 - protein, 8 aa, synthetic construct
IDVYGITD

SEQ ID NO: 8017 - protein, 8 aa, synthetic construct
IDYQTHFR

SEQ ID NO: 8018 - protein, 9 aa, synthetic construct
IEAKFYEEV

SEQ ID NO: 8019 - protein, 8 aa, synthetic construct
IEAMLEAP

SEQ ID NO: 8020 - protein, 9 aa, synthetic construct
IEFASFEDA

SEQ ID NO: 8021 - protein, 9 aa, synthetic construct
IEFDGVQSA

SEQ ID NO: 8022 - protein, 9 aa, synthetic construct
IEFKETQAL

SEQ ID NO: 8023 - protein, 9 aa, synthetic construct
IEFSRIREA

SEQ ID NO: 8024 - protein, 8 aa, synthetic construct
IEHYFSPV

SEQ ID NO: 8025 - protein, 9 aa, synthetic construct
IEISFETSP

SEQ ID NO: 8026 - protein, 9 aa, synthetic construct
IEIMLLETA

SEQ ID NO: 8027 - protein, 9 aa, synthetic construct
IELDMRTIA

SEQ ID NO: 8028 - protein, 9 aa, synthetic construct
IELLEKIVL

SEQ ID NO: 8029 - protein, 9 aa, synthetic construct
IELPSMAVA

SEQ ID NO: 8030 - protein, 9 aa, synthetic construct
IEPADAHVL

SEQ ID NO: 8031 - protein, 9 aa, synthetic construct
IEQEGPEYW

SEQ ID NO: 8032 - protein, 9 aa, synthetic construct
IEQEIRILL

SEQ ID NO: 8033 - protein, 9 aa, synthetic construct
IERTSFVTA

SEQ ID NO: 8034 - protein, 9 aa, synthetic construct
IESDPVTPP

SEQ ID NO: 8035 - protein, 9 aa, synthetic construct
IESNHPIVL

SEQ ID NO: 8036 - protein, 11 aa, synthetic construct
IETIINTFHQY

SEQ ID NO: 8037 - protein, 9 aa, synthetic construct
IEVFPTKSA

SEQ ID NO: 8038 - protein, 9 aa, synthetic construct
IEVSLPEAA

SEQ ID NO: 8039 - protein, 9 aa, synthetic construct
IEVVPSASA

SEQ ID NO: 8040 - protein, 10 aa, synthetic construct
IEYDDFVECL

SEQ ID NO: 8041 - protein, 8 aa, synthetic construct
IEYEFRVI

SEQ ID NO: 8042 - protein, 10 aa, synthetic construct
IFADRPCLPL

SEQ ID NO: 8043 - protein, 8 aa, synthetic construct
IFDEAEKL

SEQ ID NO: 8044 - protein, 9 aa, synthetic construct
IFDLGGGTF

SEQ ID NO: 8045 - protein, 9 aa, synthetic construct
IFDLQKTSL

SEQ ID NO: 8046 - protein, 10 aa, synthetic construct
IFDLQSNTVL

SEQ ID NO: 8047 - protein, 9 aa, synthetic construct
IFDPTRECM

SEQ ID NO: 8048 - protein, 9 aa, synthetic construct
IFDQSGTYL

SEQ ID NO: 8049 - protein, 9 aa, synthetic construct
IFEAAKQEL

SEQ ID NO: 8050 - protein, 8 aa, synthetic construct
IFEEAAVL

SEQ ID NO: 8051 - protein, 9 aa, synthetic construct
IFENNVVHL

SEQ ID NO: 8052 - protein, 8 aa, synthetic construct
IFGKIIRK

SEQ ID NO: 8053 - protein, 9 aa, synthetic construct
IFHEVPLKF

SEQ ID NO: 8054 - protein, 8 aa, synthetic construct
IFKDHVSL

SEQ ID NO: 8055 - protein, 8 aa, synthetic construct
IFKDKVVL

SEQ ID NO: 8056 - protein, 9 aa, synthetic construct
IFKSRLVEL

SEQ ID NO: 8057 - protein, 8 aa, synthetic construct
IFLKTRVV

SEQ ID NO: 8058 - protein, 11 aa, synthetic construct
IFLPADTVVEW

SEQ ID NO: 8059 - protein, 10 aa, synthetic construct
IFLPILRTGF

SEQ ID NO: 8060 - protein, 11 aa, synthetic construct
IFLSILSGFLY

SEQ ID NO: 8061 - protein, 9 aa, synthetic construct
IFLSQPILL

SEQ ID NO: 8062 - protein, 8 aa, synthetic construct
IFQKVGKL

SEQ ID NO: 8063 - protein, 8 aa, synthetic construct
IFQVAQEL

SEQ ID NO: 8064 - protein, 10 aa, synthetic construct
IFVRNLPFDF

SEQ ID NO: 8065 - protein, 8 aa, synthetic construct
IFYKTKEI

SEQ ID NO: 8066 - protein, 9 aa, synthetic construct
IFNGTFVKL

SEQ ID NO: 8067 - protein, 9 aa, synthetic construct
IGAEVYHNL

SEQ ID NO: 8068 - protein, 11 aa, synthetic construct
IGAILERSIDM

SEQ ID NO: 8069 - protein, 10 aa, synthetic construct
IGALLIGEEY

SEQ ID NO: 8070 - protein, 9 aa, synthetic construct
IGDEGAGYI

SEQ ID NO: 8071 - protein, 11 aa, synthetic construct
IGEFEIIDDHR

SEQ ID NO: 8072 - protein, 9 aa, synthetic construct
IGGGFGGGS

SEQ ID NO: 8073 - protein, 10 aa, synthetic construct
IGGGGFGGFG

SEQ ID NO: 8074 - protein, 11 aa, synthetic construct
IGGLAAQEVMK

SEQ ID NO: 8075 - protein, 9 aa, synthetic construct
IGIFLVSTF

SEQ ID NO: 8076 - protein, 9 aa, synthetic construct
IGKRGIIGY

SEQ ID NO: 8077 - protein, 9 aa, synthetic construct
IGKMRYVSV

SEQ ID NO: 8078 - protein, 9 aa, synthetic construct
IGLIRNLAL

SEQ ID NO: 8079 - protein, 9 aa, synthetic construct
IGPTTARAL

SEQ ID NO: 8080 - protein, 9 aa, synthetic construct
IGVEHVVVY

SEQ ID NO: 8081 - protein, 8 aa, synthetic construct
IGYLIPLM

SEQ ID NO: 8082 - protein, 9 aa, synthetic construct
IHDGLTVHL

SEQ ID NO: 8083 - protein, 9 aa, synthetic construct
IHNADLSRL

SEQ ID NO: 8084 - protein, 8 aa, synthetic construct
IHPDDSVK

SEQ ID NO: 8085 - protein, 9 aa, synthetic construct
IHPQTIIAG

SEQ ID NO: 8086 - protein, 11 aa, synthetic construct
IHTGLKSHQCP

SEQ ID NO: 8087 - protein, 8 aa, synthetic construct
IIASDDGF

SEQ ID NO: 8088 - protein, 8 aa, synthetic construct
IIDEAHER

SEQ ID NO: 8089 - protein, 9 aa, synthetic construct
IIDGKIFCV

SEQ ID NO: 8090 - protein, 10 aa, synthetic construct
IIDGRILSSK

SEQ ID NO: 8091 - protein, 9 aa, synthetic construct
IIDQHTFEV

SEQ ID NO: 8092 - protein, 9 aa, synthetic construct
IIIDSVPEV

SEQ ID NO: 8093 - protein, 9 aa, synthetic construct
IIKERELEL

SEQ ID NO: 8094 - protein, 9 aa, synthetic construct
IIKRQPVSL

SEQ ID NO: 8095 - protein, 9 aa, synthetic construct
IILDEAHER

SEQ ID NO: 8096 - protein, 10 aa, synthetic construct
IINEPTAAAI

SEQ ID NO: 8097 - protein, 9 aa, synthetic construct
IISDTSGDF

SEQ ID NO: 8098 - protein, 10 aa, synthetic construct
IKKGDLLLNR

SEQ ID NO: 8099 - protein, 8 aa, synthetic construct
IKKRFKVL

SEQ ID NO: 8100 - protein, 11 aa, synthetic construct
IKKVNGVPQYA

SEQ ID NO: 8101 - protein, 9 aa, synthetic construct
IKLDAIEPY

SEQ ID NO: 8102 - protein, 8 aa, synthetic construct
IKPPIIHY

SEQ ID NO: 8103 - protein, 9 aa, synthetic construct
ILADATEQV

SEQ ID NO: 8104 - protein, 9 aa, synthetic construct
ILADIVISA

SEQ ID NO: 8105 - protein, 9 aa, synthetic construct
ILADMADVY

SEQ ID NO: 8106 - protein, 9 aa, synthetic construct
ILAEGITIV

SEQ ID NO: 8107 - protein, 8 aa, synthetic construct
ILAIEQYE

SEQ ID NO: 8108 - protein, 10 aa, synthetic construct
ILCGFQIVNN

SEQ ID NO: 8109 - protein, 9 aa, synthetic construct
ILDDSHLLV

SEQ ID NO: 8110 - protein, 9 aa, synthetic construct
ILDEVIFKL

SEQ ID NO: 8111 - protein, 9 aa, synthetic construct
ILDKKVEKV

SEQ ID NO: 8112 - protein, 9 aa, synthetic construct
ILDPHVVLL

SEQ ID NO: 8113 - protein, 9 aa, synthetic construct
ILDPIFKVF

SEQ ID NO: 8114 - protein, 9 aa, synthetic construct
ILDQKINEV

SEQ ID NO: 8115 - protein, 10 aa, synthetic construct
ILELAGNAAR

SEQ ID NO: 8116 - protein, 9 aa, synthetic construct
ILESSVDPI

SEQ ID NO: 8117 - protein, 9 aa, synthetic construct
ILFEGVEYI

SEQ ID NO: 8118 - protein, 9 aa, synthetic construct
ILFGHENRV

SEQ ID NO: 8119 - protein, 8 aa, synthetic construct
ILGLVTEV

SEQ ID NO: 8120 - protein, 9 aa, synthetic construct
ILGPPGSVY

SEQ ID NO: 8121 - protein, 9 aa, synthetic construct
ILHDDEVTV

SEQ ID NO: 8122 - protein, 8 aa, synthetic construct
ILKQMQVL

SEQ ID NO: 8123 - protein, 9 aa, synthetic construct
ILLDRLLYL

SEQ ID NO: 8124 - protein, 9 aa, synthetic construct
ILLPYVSKV

SEQ ID NO: 8125 - protein, 9 aa, synthetic construct
ILMEHIHKL

SEQ ID NO: 8126 - protein, 9 aa, synthetic construct
ILNPYNLFL

SEQ ID NO: 8127 - protein, 10 aa, synthetic construct
ILPVGAANFR

SEQ ID NO: 8128 - protein, 9 aa, synthetic construct
ILQAVQAAE

SEQ ID NO: 8129 - protein, 9 aa, synthetic construct
ILQDGQFLV

SEQ ID NO: 8130 - protein, 9 aa, synthetic construct
ILSEVQQAV

SEQ ID NO: 8131 - protein, 9 aa, synthetic construct
ILSKRGFSV

SEQ ID NO: 8132 - protein, 9 aa, synthetic construct
ILSQYITFV

SEQ ID NO: 8133 - protein, 9 aa, synthetic construct
ILTDVVIVV

SEQ ID NO: 8134 - protein, 9 aa, synthetic construct
ILTESEIKL

SEQ ID NO: 8135 - protein, 9 aa, synthetic construct
ILTEVNYEV

SEQ ID NO: 8136 - protein, 11 aa, synthetic construct
ILVTGIKVVDL

SEQ ID NO: 8137 - protein, 9 aa, synthetic construct
ILWEHLEIL

SEQ ID NO: 8138 - protein, 8 aa, synthetic construct
ILWKKNEV

SEQ ID NO: 8139 - protein, 9 aa, synthetic construct
ILYETVLTI

SEQ ID NO: 8140 - protein, 9 aa, synthetic construct
ILYGEVEKL

SEQ ID NO: 8141 - protein, 9 aa, synthetic construct
IMNRKDFKI

SEQ ID NO: 8142 - protein, 8 aa, synthetic construct
IMRQTLEI

SEQ ID NO: 8143 - protein, 9 aa, synthetic construct
IMYLIVETV

SEQ ID NO: 8144 - protein, 9 aa, synthetic construct
IMYMAGNTI

SEQ ID NO: 8145 - protein, 11 aa, synthetic construct
INEPTAAALAY

SEQ ID NO: 8146 - protein, 11 aa, synthetic construct
INKRTNAENEF

SEQ ID NO: 8147 - protein, 10 aa, synthetic construct
INPDLALEEK

SEQ ID NO: 8148 - protein, 9 aa, synthetic construct
IPAAEPIEY

SEQ ID NO: 8149 - protein, 10 aa, synthetic construct
IPAAESQIVY

SEQ ID NO: 8150 - protein, 9 aa, synthetic construct
IPADIVFVL

SEQ ID NO: 8151 - protein, 9 aa, synthetic construct
IPADTFAAL

SEQ ID NO: 8152 - protein, 9 aa, synthetic construct
IPAEEIPAY

SEQ ID NO: 8153 - protein, 8 aa, synthetic construct
IPAESYTF

SEQ ID NO: 8154 - protein, 9 aa, synthetic construct
IPAESYTFF

SEQ ID NO: 8155 - protein, 9 aa, synthetic construct
IPAGGVLTL

SEQ ID NO: 8156 - protein, 10 aa, synthetic construct
IPAKPPVSFF

SEQ ID NO: 8157 - protein, 9 aa, synthetic construct
IPANPPMAF

SEQ ID NO: 8158 - protein, 9 aa, synthetic construct
IPANWKTEL

SEQ ID NO: 8159 - protein, 9 aa, synthetic construct
IPAPAFLLL

SEQ ID NO: 8160 - protein, 9 aa, synthetic construct
IPASKVFSL

SEQ ID NO: 8161 - protein, 10 aa, synthetic construct
IPCAIDQDPY

SEQ ID NO: 8162 - protein, 9 aa, synthetic construct
IPCPTVVLL

SEQ ID NO: 8163 - protein, 11 aa, synthetic construct
IPDAKHVFTTF

SEQ ID NO: 8164 - protein, 10 aa, synthetic construct
IPDALGLVEY

SEQ ID NO: 8165 - protein, 11 aa, synthetic construct
IPDASKLQFIL

SEQ ID NO: 8166 - protein, 11 aa, synthetic construct
IPDEAKALSLL

SEQ ID NO: 8167 - protein, 9 aa, synthetic construct
IPDGCGVKY

SEQ ID NO: 8168 - protein, 9 aa, synthetic construct
IPEAGKALL

SEQ ID NO: 8169 - protein, 9 aa, synthetic construct
IPEELKPWL

SEQ ID NO: 8170 - protein, 11 aa, synthetic construct
IPEGEILVITY

SEQ ID NO: 8171 - protein, 9 aa, synthetic construct
IPELHRPVV

SEQ ID NO: 8172 - protein, 10 aa, synthetic construct
IPFDGDLLSM

SEQ ID NO: 8173 - protein, 10 aa, synthetic construct
IPFDPKFITY

SEQ ID NO: 8174 - protein, 9 aa, synthetic construct
IPFEFPLHL

SEQ ID NO: 8175 - protein, 9 aa, synthetic construct
IPFNQALVF

SEQ ID NO: 8176 - protein, 9 aa, synthetic construct
IPFRPSIQF

SEQ ID NO: 8177 - protein, 9 aa, synthetic construct
IPFSGALEL

SEQ ID NO: 8178 - protein, 9 aa, synthetic construct
IPFSNPRVL

SEQ ID NO: 8179 - protein, 9 aa, synthetic construct
IPFVDPDSW

SEQ ID NO: 8180 - protein, 10 aa, synthetic construct
IPGGLSEAKP

SEQ ID NO: 8181 - protein, 11 aa, synthetic construct
IPGGLSEAKPA

SEQ ID NO: 8182 - protein, 9 aa, synthetic construct
IPHMDIEAL

SEQ ID NO: 8183 - protein, 8 aa, synthetic construct
IPHQGPPL

SEQ ID NO: 8184 - protein, 9 aa, synthetic construct
IPHTDPVDY

SEQ ID NO: 8185 - protein, 9 aa, synthetic construct
IPIILQSAL

SEQ ID NO: 8186 - protein, 8 aa, synthetic construct
IPILASAL

SEQ ID NO: 8187 - protein, 11 aa, synthetic construct
IPITSNTLIYY

SEQ ID NO: 8188 - protein, 9 aa, synthetic construct
IPKLPAVSF

SEQ ID NO: 8189 - protein, 11 aa, synthetic construct
IPKNKTKENIL

SEQ ID NO: 8190 - protein, 9 aa, synthetic construct
IPKPLNPAL

SEQ ID NO: 8191 - protein, 9 aa, synthetic construct
IPKQVSISF

SEQ ID NO: 8192 - protein, 9 aa, synthetic construct
IPKSAVGEL

SEQ ID NO: 8193 - protein, 9 aa, synthetic construct
IPKSKFLAL

SEQ ID NO: 8194 - protein, 11 aa, synthetic construct
IPKSKTKEQIL

SEQ ID NO: 8195 - protein, 9 aa, synthetic construct
IPKVEWSAF

SEQ ID NO: 8196 - protein, 9 aa, synthetic construct
IPLGEIISF

SEQ ID NO: 8197 - protein, 10 aa, synthetic construct
IPLHQINQVY

SEQ ID NO: 8198 - protein, 9 aa, synthetic construct
IPLIMSVLY

SEQ ID NO: 8199 - protein, 9 aa, synthetic construct
IPLSKIKTL

SEQ ID NO: 8200 - protein, 9 aa, synthetic construct
IPNERTMQL

SEQ ID NO: 8201 - protein, 10 aa, synthetic construct
IPNSHILDQY

SEQ ID NO: 8202 - protein, 9 aa, synthetic construct
IPQDTIPEY

SEQ ID NO: 8203 - protein, 11 aa, synthetic construct
IPQGGRGAIQF

SEQ ID NO: 8204 - protein, 9 aa, synthetic construct
IPQIRNPSL

SEQ ID NO: 8205 - protein, 10 aa, synthetic construct
IPQKQREITL

SEQ ID NO: 8206 - protein, 9 aa, synthetic construct
IPQPSGKVL

SEQ ID NO: 8207 - protein, 9 aa, synthetic construct
IPQPTPASL

SEQ ID NO: 8208 - protein, 10 aa, synthetic construct
IPRADTLDEY

SEQ ID NO: 8209 - protein, 9 aa, synthetic construct
IPREVSETL

SEQ ID NO: 8210 - protein, 9 aa, synthetic construct
IPRGPASQF

SEQ ID NO: 8211 - protein, 10 aa, synthetic construct
IPRIEDGNNF

SEQ ID NO: 8212 - protein, 9 aa, synthetic construct
IPRIKNACL

SEQ ID NO: 8213 - protein, 9 aa, synthetic construct
IPRLERILL

SEQ ID NO: 8214 - protein, 9 aa, synthetic construct
IPRLIVSQL

SEQ ID NO: 8215 - protein, 9 aa, synthetic construct
IPRPEVQAL

SEQ ID NO: 8216 - protein, 10 aa, synthetic construct
IPRPGTGITI

SEQ ID NO: 8217 - protein, 9 aa, synthetic construct
IPRPILVLL

SEQ ID NO: 8218 - protein, 10 aa, synthetic construct
IPRPVDGVEV

SEQ ID NO: 8219 - protein, 10 aa, synthetic construct
IPRQLVYIGL

SEQ ID NO: 8220 - protein, 9 aa, synthetic construct
IPRQVAQTL

SEQ ID NO: 8221 - protein, 10 aa, synthetic construct
IPRSFRHLSF

SEQ ID NO: 8222 - protein, 10 aa, synthetic construct
IPRSILMTTF

SEQ ID NO: 8223 - protein, 9 aa, synthetic construct
IPRSITVLV

SEQ ID NO: 8224 - protein, 10 aa, synthetic construct
IPRSITVLVE

SEQ ID NO: 8225 - protein, 11 aa, synthetic construct
IPRTPLSPSPM

SEQ ID NO: 8226 - protein, 9 aa, synthetic construct
IPRYIVSQL

SEQ ID NO: 8227 - protein, 10 aa, synthetic construct
IPSEDHQVLY

SEQ ID NO: 8228 - protein, 11 aa, synthetic construct
IPSEDIARNLM

SEQ ID NO: 8229 - protein, 9 aa, synthetic construct
IPSEWHIEL

SEQ ID NO: 8230 - protein, 9 aa, synthetic construct
IPSPLQPEM

SEQ ID NO: 8231 - protein, 10 aa, synthetic construct
IPSSVIHPAM

SEQ ID NO: 8232 - protein, 9 aa, synthetic construct
IPSSVPATF

SEQ ID NO: 8233 - protein, 9 aa, synthetic construct
IPSSWRLLF

SEQ ID NO: 8234 - protein, 9 aa, synthetic construct
IPTDIISDL

SEQ ID NO: 8235 - protein, 10 aa, synthetic construct
IPTDVLKIVY

SEQ ID NO: 8236 - protein, 9 aa, synthetic construct
IPTEQVNEL

SEQ ID NO: 8237 - protein, 9 aa, synthetic construct
IPTKQTQTF

SEQ ID NO: 8238 - protein, 9 aa, synthetic construct
IPTSARSML

SEQ ID NO: 8239 - protein, 9 aa, synthetic construct
IPTSRVITL

SEQ ID NO: 8240 - protein, 9 aa, synthetic construct
IPVDFSKQY

SEQ ID NO: 8241 - protein, 9 aa, synthetic construct
IPVPYVEKY

SEQ ID NO: 8242 - protein, 9 aa, synthetic construct
IPVSDMVMY

SEQ ID NO: 8243 - protein, 9 aa, synthetic construct
IPVSKPLSL

SEQ ID NO: 8244 - protein, 9 aa, synthetic construct
IPVTIITGY

SEQ ID NO: 8245 - protein, 8 aa, synthetic construct
IPVVGSVL

SEQ ID NO: 8246 - protein, 9 aa, synthetic construct
IPVMGGLAL

SEQ ID NO: 8247 - protein, 10 aa, synthetic construct
IPWTPPGTAL

SEQ ID NO: 8248 - protein, 10 aa, synthetic construct
IPYEGDEISM

SEQ ID NO: 8249 - protein, 9 aa, synthetic construct
IPYKPNYSL

SEQ ID NO: 8250 - protein, 9 aa, synthetic construct
IPMAKSYVL

SEQ ID NO: 8251 - protein, 8 aa, synthetic construct
IPMIHAVL

SEQ ID NO: 8252 - protein, 8 aa, synthetic construct
IPMIIHQL

SEQ ID NO: 8253 - protein, 9 aa, synthetic construct
IQAAISQAF

SEQ ID NO: 8254 - protein, 9 aa, synthetic construct
IQAGIFQEF

SEQ ID NO: 8255 - protein, 8 aa, synthetic construct
IQALSNSE

SEQ ID NO: 8256 - protein, 8 aa, synthetic construct
IQAVLLPK

SEQ ID NO: 8257 - protein, 8 aa, synthetic construct
IQCICHVI

SEQ ID NO: 8258 - protein, 8 aa, synthetic construct
IQFKLEKI

SEQ ID NO: 8259 - protein, 8 aa, synthetic construct
IQHLIPKI

SEQ ID NO: 8260 - protein, 9 aa, synthetic construct
IQINVGTTV

SEQ ID NO: 8261 - protein, 10 aa, synthetic construct
IQKESTLHLV

SEQ ID NO: 8262 - protein, 11 aa, synthetic construct
IQKESTLHLVL

SEQ ID NO: 8263 - protein, 9 aa, synthetic construct
IQNDRQLQY

SEQ ID NO: 8264 - protein, 9 aa, synthetic construct
IQNVPLEDR

SEQ ID NO: 8265 - protein, 8 aa, synthetic construct
IQQLLKKI

SEQ ID NO: 8266 - protein, 9 aa, synthetic construct
IQRLVQIHV

SEQ ID NO: 8267 - protein, 8 aa, synthetic construct
IQRTPKIQ

SEQ ID NO: 8268 - protein, 10 aa, synthetic construct
IQRTPKIQVY

SEQ ID NO: 8269 - protein, 8 aa, synthetic construct
IQVHYYED

SEQ ID NO: 8270 - protein, 9 aa, synthetic construct
IQVTKVTQV

SEQ ID NO: 8271 - protein, 8 aa, synthetic construct
IQVVVATV

SEQ ID NO: 8272 - protein, 8 aa, synthetic construct
IQWIVVRI

SEQ ID NO: 8273 - protein, 9 aa, synthetic construct
IQWSIVPEV

SEQ ID NO: 8274 - protein, 9 aa, synthetic construct
IQYDRTLLV

SEQ ID NO: 8275 - protein, 9 aa, synthetic construct
IQYIRPVFV

SEQ ID NO: 8276 - protein, 9 aa, synthetic construct
IQYLSKIKI

SEQ ID NO: 8277 - protein, 9 aa, synthetic construct
IRAAPPPLF

SEQ ID NO: 8278 - protein, 9 aa, synthetic construct
IRCGFNINV

SEQ ID NO: 8279 - protein, 9 aa, synthetic construct
IRFDHIYTK

SEQ ID NO: 8280 - protein, 9 aa, synthetic construct
IRFDYGYNL

SEQ ID NO: 8281 - protein, 9 aa, synthetic construct
IRFFGTTNF

SEQ ID NO: 8282 - protein, 10 aa, synthetic construct
IRFFPPKSNK

SEQ ID NO: 8283 - protein, 9 aa, synthetic construct
IRHILETRY

SEQ ID NO: 8284 - protein, 9 aa, synthetic construct
IRKGLNAYL

SEQ ID NO: 8285 - protein, 9 aa, synthetic construct
IRLENEIQT

SEQ ID NO: 8286 - protein, 10 aa, synthetic construct
IRLENEIQTY

SEQ ID NO: 8287 - protein, 9 aa, synthetic construct
IRLTLPPPK

SEQ ID NO: 8288 - protein, 9 aa, synthetic construct
IRMPSLPSY

SEQ ID NO: 8289 - protein, 9 aa, synthetic construct
IRPDCFLEV

SEQ ID NO: 8290 - protein, 9 aa, synthetic construct
IRPEHVLRL

SEQ ID NO: 8291 - protein, 9 aa, synthetic construct
IRPNIILVL

SEQ ID NO: 8292 - protein, 9 aa, synthetic construct
IRQNLQICV

SEQ ID NO: 8293 - protein, 9 aa, synthetic construct
IRSAVSVHL

SEQ ID NO: 8294 - protein, 9 aa, synthetic construct
IRSKIITYI

SEQ ID NO: 8295 - protein, 9 aa, synthetic construct
IRSSHIKYI

SEQ ID NO: 8296 - protein, 9 aa, synthetic construct
IRSSYIRVL

SEQ ID NO: 8297 - protein, 9 aa, synthetic construct
IRTESIRWL

SEQ ID NO: 8298 - protein, 9 aa, synthetic construct
IRTGLVRLL

SEQ ID NO: 8299 - protein, 9 aa, synthetic construct
IRVGWEQLL

SEQ ID NO: 8300 - protein, 11 aa, synthetic construct
IRVKTNLPIFK

SEQ ID NO: 8301 - protein, 9 aa, synthetic construct
IRYLVEKPK

SEQ ID NO: 8302 - protein, 11 aa, synthetic construct
ISDALSERDKV

SEQ ID NO: 8303 - protein, 9 aa, synthetic construct
ISDLFIDNY

SEQ ID NO: 8304 - protein, 8 aa, synthetic construct
ISETNVIL

SEQ ID NO: 8305 - protein, 9 aa, synthetic construct
ISETNVILS

SEQ ID NO: 8306 - protein, 10 aa, synthetic construct
ISFHLPINSR

SEQ ID NO: 8307 - protein, 10 aa, synthetic construct
ISFPATGCQK

SEQ ID NO: 8308 - protein, 9 aa, synthetic construct
ISPDTVGTL

SEQ ID NO: 8309 - protein, 9 aa, synthetic construct
ISPFHDIPL

SEQ ID NO: 8310 - protein, 9 aa, synthetic construct
ISPFNKSAL

SEQ ID NO: 8311 - protein, 9 aa, synthetic construct
ITADVYSEY

SEQ ID NO: 8312 - protein, 9 aa, synthetic construct
ITDDLHFYV

SEQ ID NO: 8313 - protein, 11 aa, synthetic construct
ITDLPDHLLSY

SEQ ID NO: 8314 - protein, 9 aa, synthetic construct
ITDQGIEFY

SEQ ID NO: 8315 - protein, 9 aa, synthetic construct
ITDVDNGYY

SEQ ID NO: 8316 - protein, 9 aa, synthetic construct
ITEDKTELY

SEQ ID NO: 8317 - protein, 10 aa, synthetic construct
ITHTLNLDKI

SEQ ID NO: 8318 - protein, 9 aa, synthetic construct
ITNKYQLVF

SEQ ID NO: 8319 - protein, 9 aa, synthetic construct
ITPEFISTF

SEQ ID NO: 8320 - protein, 10 aa, synthetic construct
ITPESILSAL

SEQ ID NO: 8321 - protein, 9 aa, synthetic construct
ITPLGSSEL

SEQ ID NO: 8322 - protein, 11 aa, synthetic construct
ITQIEHEVSSS

SEQ ID NO: 8323 - protein, 9 aa, synthetic construct
ITTDVLYTI

SEQ ID NO: 8324 - protein, 9 aa, synthetic construct
IVAKRLESL

SEQ ID NO: 8325 - protein, 9 aa, synthetic construct
IVALILSTK

SEQ ID NO: 8326 - protein, 9 aa, synthetic construct
IVAPGTFEV

SEQ ID NO: 8327 - protein, 9 aa, synthetic construct
IVASFFILK

SEQ ID NO: 8328 - protein, 10 aa, synthetic construct
IVDGNHRLTL

SEQ ID NO: 8329 - protein, 9 aa, synthetic construct
IVDPFQILV

SEQ ID NO: 8330 - protein, 9 aa, synthetic construct
IVDSATALY

SEQ ID NO: 8331 - protein, 9 aa, synthetic construct
IVFGVALRK

SEQ ID NO: 8332 - protein, 9 aa, synthetic construct
IVFNIYHSK

SEQ ID NO: 8333 - protein, 8 aa, synthetic construct
IVGPLVEM

SEQ ID NO: 8334 - protein, 9 aa, synthetic construct
IVKPKPRAL

SEQ ID NO: 8335 - protein, 9 aa, synthetic construct
IVLVGRSGT

SEQ ID NO: 8336 - protein, 9 aa, synthetic construct
IVNDFAYMK

SEQ ID NO: 8337 - protein, 10 aa, synthetic construct
IVNDFAYMKK

SEQ ID NO: 8338 - protein, 9 aa, synthetic construct
IVPEGVHAL

SEQ ID NO: 8339 - protein, 8 aa, synthetic construct
IVPNGITL

SEQ ID NO: 8340 - protein, 9 aa, synthetic construct
IVRKLVTAL

SEQ ID NO: 8341 - protein, 9 aa, synthetic construct
IVTSVLLLY

SEQ ID NO: 8342 - protein, 10 aa, synthetic construct
IVYCGQVFEK

SEQ ID NO: 8343 - protein, 9 aa, synthetic construct
IVYEKIMEH

SEQ ID NO: 8344 - protein, 9 aa, synthetic construct
IVYPGIAVF

SEQ ID NO: 8345 - protein, 9 aa, synthetic construct
IVMETVPVL

SEQ ID NO: 8346 - protein, 9 aa, synthetic construct
IWDVSVNSV

SEQ ID NO: 8347 - protein, 10 aa, synthetic construct
IYDDQGHIHL

SEQ ID NO: 8348 - protein, 9 aa, synthetic construct
IYDEAISSF

SEQ ID NO: 8349 - protein, 8 aa, synthetic construct
IYDFIGEF

SEQ ID NO: 8350 - protein, 9 aa, synthetic construct
IYDFIGEFM

SEQ ID NO: 8351 - protein, 8 aa, synthetic construct
IYDIFQKL

SEQ ID NO: 8352 - protein, 9 aa, synthetic construct
IYDKTSVLF

SEQ ID NO: 8353 - protein, 9 aa, synthetic construct
IYDLATQTL

SEQ ID NO: 8354 - protein, 9 aa, synthetic construct
IYDLHESTY

SEQ ID NO: 8355 - protein, 9 aa, synthetic construct
IYDLLDTAM

SEQ ID NO: 8356 - protein, 8 aa, synthetic construct
IYDMSTVM

SEQ ID NO: 8357 - protein, 9 aa, synthetic construct
IYDSVKVYF

SEQ ID NO: 8358 - protein, 8 aa, synthetic construct
IYDTHSLM

SEQ ID NO: 8359 - protein, 9 aa, synthetic construct
IYEPNFIFF

SEQ ID NO: 8360 - protein, 11 aa, synthetic construct
IYFNPSGVIEG

SEQ ID NO: 8361 - protein, 9 aa, synthetic construct
IYGYVAEQF

SEQ ID NO: 8362 - protein, 9 aa, synthetic construct
IYIAGHPAF

SEQ ID NO: 8363 - protein, 9 aa, synthetic construct
IYIDRFEDL

SEQ ID NO: 8364 - protein, 9 aa, synthetic construct
IYIKQIKTF

SEQ ID NO: 8365 - protein, 10 aa, synthetic construct
IYISTLKTEF

SEQ ID NO: 8366 - protein, 9 aa, synthetic construct
IYIVHDEVK

SEQ ID NO: 8367 - protein, 9 aa, synthetic construct
IYIWDLNNF

SEQ ID NO: 8368 - protein, 9 aa, synthetic construct
IYKELLISL

SEQ ID NO: 8369 - protein, 9 aa, synthetic construct
IYLDGIITI

SEQ ID NO: 8370 - protein, 9 aa, synthetic construct
IYLLIHNNF

SEQ ID NO: 8371 - protein, 9 aa, synthetic construct
IYLPYLHEW

SEQ ID NO: 8372 - protein, 9 aa, synthetic construct
IYLRLLVKL

SEQ ID NO: 8373 - protein, 8 aa, synthetic construct
IYQALLEY

SEQ ID NO: 8374 - protein, 10 aa, synthetic construct
IYSAGDSLMI

SEQ ID NO: 8375 - protein, 11 aa, synthetic construct
IYTSPIKALSN

SEQ ID NO: 8376 - protein, 9 aa, synthetic construct
IYVHDLLTF

SEQ ID NO: 8377 - protein, 11 aa, synthetic construct
IYVHKPPVHIR

SEQ ID NO: 8378 - protein, 9 aa, synthetic construct
IYYFLEDVF

SEQ ID NO: 8379 - protein, 9 aa, synthetic construct
IYYITGETK

SEQ ID NO: 8380 - protein, 9 aa, synthetic construct
IMDATNILV

SEQ ID NO: 8381 - protein, 9 aa, synthetic construct
IMEDIILTL

SEQ ID NO: 8382 - protein, 9 aa, synthetic construct
IMGIGPVPA

SEQ ID NO: 8383 - protein, 8 aa, synthetic construct
IMLPVLGI

SEQ ID NO: 8384 - protein, 9 aa, synthetic construct
KACTIAIRY

SEQ ID NO: 8385 - protein, 9 aa, synthetic construct
KADLEMQIE

SEQ ID NO: 8386 - protein, 10 aa, synthetic construct
KAEAESLYQS

SEQ ID NO: 8387 - protein, 9 aa, synthetic construct
KAEGAGDAK

SEQ ID NO: 8388 - protein, 9 aa, synthetic construct
KAFDRPSLF

SEQ ID NO: 8389 - protein, 9 aa, synthetic construct
KAFDYPSRF

SEQ ID NO: 8390 - protein, 10 aa, synthetic construct
KAFNQGKIFK

SEQ ID NO: 8391 - protein, 9 aa, synthetic construct
KAFPFHIIF

SEQ ID NO: 8392 - protein, 9 aa, synthetic construct
KAIELLQEF

SEQ ID NO: 8393 - protein, 9 aa, synthetic construct
KAPEPLSSL

SEQ ID NO: 8394 - protein, 9 aa, synthetic construct
KARNIFKEL

SEQ ID NO: 8395 - protein, 9 aa, synthetic construct
KASLRELAL

SEQ ID NO: 8396 - protein, 9 aa, synthetic construct
KAVSLFLCY

SEQ ID NO: 8397 - protein, 9 aa, synthetic construct
KAYPTSVCF

SEQ ID NO: 8398 - protein, 9 aa, synthetic construct
KAMGIMNSF

SEQ ID NO: 8399 - protein, 10 aa, synthetic construct
KCPFTGNVSI

SEQ ID NO: 8400 - protein, 9 aa, synthetic construct
KDEIFQVQW

SEQ ID NO: 8401 - protein, 10 aa, synthetic construct
KEADLPMTAA

SEQ ID NO: 8402 - protein, 9 aa, synthetic construct
KEAFVVEEW

SEQ ID NO: 8403 - protein, 11 aa, synthetic construct
KEAGDFHFQPA

SEQ ID NO: 8404 - protein, 9 aa, synthetic construct
KEASVHIQL

SEQ ID NO: 8405 - protein, 9 aa, synthetic construct
KEEDLQWVL

SEQ ID NO: 8406 - protein, 10 aa, synthetic construct
KEETQPPVAL

SEQ ID NO: 8407 - protein, 10 aa, synthetic construct
KEFCAFSQTL

SEQ ID NO: 8408 - protein, 9 aa, synthetic construct
KEFDGKSLV

SEQ ID NO: 8409 - protein, 11 aa, synthetic construct
KEFDGKSLVSV

SEQ ID NO: 8410 - protein, 9 aa, synthetic construct
KEFEGKTLV

SEQ ID NO: 8411 - protein, 9 aa, synthetic construct
KEFEKFKFA

SEQ ID NO: 8412 - protein, 9 aa, synthetic construct
KEFELLDKA

SEQ ID NO: 8413 - protein, 9 aa, synthetic construct
KEFEQIEQL

SEQ ID NO: 8414 - protein, 9 aa, synthetic construct
KEFFFVKVF

SEQ ID NO: 8415 - protein, 9 aa, synthetic construct
KEFGTNIKL

SEQ ID NO: 8416 - protein, 9 aa, synthetic construct
KEFHFILDV

SEQ ID NO: 8417 - protein, 10 aa, synthetic construct
KEFKGFGTEV

SEQ ID NO: 8418 - protein, 9 aa, synthetic construct
KEFNFPEEA

SEQ ID NO: 8419 - protein, 9 aa, synthetic construct
KEFRFEPSS

SEQ ID NO: 8420 - protein, 9 aa, synthetic construct
KEFSNMVTA

SEQ ID NO: 8421 - protein, 9 aa, synthetic construct
KEHDLFFKA

SEQ ID NO: 8422 - protein, 10 aa, synthetic construct
KEHEEFQITA

SEQ ID NO: 8423 - protein, 9 aa, synthetic construct
KEHEYRLLA

SEQ ID NO: 8424 - protein, 10 aa, synthetic construct
KEHSFEVSLF

SEQ ID NO: 8425 - protein, 10 aa, synthetic construct
KEIDAYIVQA

SEQ ID NO: 8426 - protein, 9 aa, synthetic construct
KEIEGIFHA

SEQ ID NO: 8427 - protein, 10 aa, synthetic construct
KEIEGIFHAT

SEQ ID NO: 8428 - protein, 9 aa, synthetic construct
KEIEKFLDP

SEQ ID NO: 8429 - protein, 9 aa, synthetic construct
KEIEKVALP

SEQ ID NO: 8430 - protein, 9 aa, synthetic construct
KEIGELTQL

SEQ ID NO: 8431 - protein, 9 aa, synthetic construct
KEIGGLTQV

SEQ ID NO: 8432 - protein, 9 aa, synthetic construct
KEIKEVIEL

SEQ ID NO: 8433 - protein, 9 aa, synthetic construct
KEIQNLIKA

SEQ ID NO: 8434 - protein, 10 aa, synthetic construct
KEIYNEKELL

SEQ ID NO: 8435 - protein, 9 aa, synthetic construct
KEKEGFPIT

SEQ ID NO: 8436 - protein, 9 aa, synthetic construct
KEKKIFQIP

SEQ ID NO: 8437 - protein, 9 aa, synthetic construct
KEKSIFLVA

SEQ ID NO: 8438 - protein, 10 aa, synthetic construct
KEKYIDQEEL

SEQ ID NO: 8439 - protein, 10 aa, synthetic construct
KELEKILTTA

SEQ ID NO: 8440 - protein, 9 aa, synthetic construct
KELEKQLVA

SEQ ID NO: 8441 - protein, 9 aa, synthetic construct
KELQKLIEA

SEQ ID NO: 8442 - protein, 8 aa, synthetic construct
KELQPIVY

SEQ ID NO: 8443 - protein, 9 aa, synthetic construct
KEMENFEAP

SEQ ID NO: 8444 - protein, 9 aa, synthetic construct
KENSHFFVA

SEQ ID NO: 8445 - protein, 9 aa, synthetic construct
KEQGRLLVA

SEQ ID NO: 8446 - protein, 9 aa, synthetic construct
KEQRPTTLP

SEQ ID NO: 8447 - protein, 9 aa, synthetic construct
KEQTFYHVA

SEQ ID NO: 8448 - protein, 9 aa, synthetic construct
KESDIYIVA

SEQ ID NO: 8449 - protein, 9 aa, synthetic construct
KESTLHLVL

SEQ ID NO: 8450 - protein, 9 aa, synthetic construct
KEVEQFTQV

SEQ ID NO: 8451 - protein, 10 aa, synthetic construct
KEVEQFTQVA

SEQ ID NO: 8452 - protein, 9 aa, synthetic construct
KEVQDGIEL

SEQ ID NO: 8453 - protein, 9 aa, synthetic construct
KEVQDLFEA

SEQ ID NO: 8454 - protein, 10 aa, synthetic construct
KEYDGFTITI

SEQ ID NO: 8455 - protein, 9 aa, synthetic construct
KEYENIIAL

SEQ ID NO: 8456 - protein, 10 aa, synthetic construct
KEYERFSKYM

SEQ ID NO: 8457 - protein, 9 aa, synthetic construct
KEYILVEEA

SEQ ID NO: 8458 - protein, 9 aa, synthetic construct
KEYLFYLNV

SEQ ID NO: 8459 - protein, 9 aa, synthetic construct
KEYLKALAA

SEQ ID NO: 8460 - protein, 9 aa, synthetic construct
KEYLKQLAA

SEQ ID NO: 8461 - protein, 10 aa, synthetic construct
KEYNEFAEVF

SEQ ID NO: 8462 - protein, 9 aa, synthetic construct
KEYPDFNFV

SEQ ID NO: 8463 - protein, 9 aa, synthetic construct
KEYVGIVRL

SEQ ID NO: 8464 - protein, 9 aa, synthetic construct
KEYWFVLTA

SEQ ID NO: 8465 - protein, 8 aa, synthetic construct
KFDEVVSL

SEQ ID NO: 8466 - protein, 9 aa, synthetic construct
KFDPMGKYF

SEQ ID NO: 8467 - protein, 9 aa, synthetic construct
KFDVTQCMF

SEQ ID NO: 8468 - protein, 10 aa, synthetic construct
KFHTEALTAL

SEQ ID NO: 8469 - protein, 10 aa, synthetic construct
KFIDPIYQVW

SEQ ID NO: 8470 - protein, 9 aa, synthetic construct
KFIDTTSKF

SEQ ID NO: 8471 - protein, 9 aa, synthetic construct
KFKFPGRQK

SEQ ID NO: 8472 - protein, 10 aa, synthetic construct
KFLEHTNFEF

SEQ ID NO: 8473 - protein, 9 aa, synthetic construct
KFLEQVHQL

SEQ ID NO: 8474 - protein, 8 aa, synthetic construct
KFPGRQKI

SEQ ID NO: 8475 - protein, 9 aa, synthetic construct
KFVETHPEF

SEQ ID NO: 8476 - protein, 9 aa, synthetic construct
KFVNKSYLL

SEQ ID NO: 8477 - protein, 9 aa, synthetic construct
KFYESIMKI

SEQ ID NO: 8478 - protein, 9 aa, synthetic construct
KGVHSHKKK

SEQ ID NO: 8479 - protein, 9 aa, synthetic construct
KIALRYVAL

SEQ ID NO: 8480 - protein, 9 aa, synthetic construct
KICDYLFNV

SEQ ID NO: 8481 - protein, 9 aa, synthetic construct
KIDENQLMY

SEQ ID NO: 8482 - protein, 10 aa, synthetic construct
KIFDEILVNA

SEQ ID NO: 8483 - protein, 11 aa, synthetic construct
KIFEMGPVFTL

SEQ ID NO: 8484 - protein, 9 aa, synthetic construct
KIGDFGLTK

SEQ ID NO: 8485 - protein, 8 aa, synthetic construct
KIIAPSPV

SEQ ID NO: 8486 - protein, 10 aa, synthetic construct
KIIETTGVHF

SEQ ID NO: 8487 - protein, 9 aa, synthetic construct
KILEDVVGV

SEQ ID NO: 8488 - protein, 9 aa, synthetic construct
KILPTLEAV

SEQ ID NO: 8489 - protein, 11 aa, synthetic construct
KILQGNENGNF

SEQ ID NO: 8490 - protein, 9 aa, synthetic construct
KINKKRIAL

SEQ ID NO: 8491 - protein, 10 aa, synthetic construct
KIPNFWVTTF

SEQ ID NO: 8492 - protein, 9 aa, synthetic construct
KIRDLLPVM

SEQ ID NO: 8493 - protein, 9 aa, synthetic construct
KIRGVINQL

SEQ ID NO: 8494 - protein, 10 aa, synthetic construct
KITVPASQKL

SEQ ID NO: 8495 - protein, 10 aa, synthetic construct
KIVNTVLQEL

SEQ ID NO: 8496 - protein, 9 aa, synthetic construct
KIWDPVHRV

SEQ ID NO: 8497 - protein, 9 aa, synthetic construct
KIYEGQVEV

SEQ ID NO: 8498 - protein, 9 aa, synthetic construct
KKSDYIKLY

SEQ ID NO: 8499 - protein, 11 aa, synthetic construct
KLADDVDLEQV

SEQ ID NO: 8500 - protein, 10 aa, synthetic construct
KLAEVGRVYL

SEQ ID NO: 8501 - protein, 9 aa, synthetic construct
KLDTLCDLY

SEQ ID NO: 8502 - protein, 11 aa, synthetic construct
KLDVDAPRLLK

SEQ ID NO: 8503 - protein, 11 aa, synthetic construct
KLFDAPLSISK

SEQ ID NO: 8504 - protein, 9 aa, synthetic construct
KLFDKLLEY

SEQ ID NO: 8505 - protein, 9 aa, synthetic construct
KLFDTQQFL

SEQ ID NO: 8506 - protein, 10 aa, synthetic construct
KLFEGENEHL

SEQ ID NO: 8507 - protein, 9 aa, synthetic construct
KLFGMIITI

SEQ ID NO: 8508 - protein, 9 aa, synthetic construct
KLFIGGLSF

SEQ ID NO: 8509 - protein, 11 aa, synthetic construct
KLFKPGQEAVK

SEQ ID NO: 8510 - protein, 9 aa, synthetic construct
KLFPFYFHI

SEQ ID NO: 8511 - protein, 9 aa, synthetic construct
KLGEIVTTI

SEQ ID NO: 8512 - protein, 9 aa, synthetic construct
KLHDINAQL

SEQ ID NO: 8513 - protein, 10 aa, synthetic construct
KLHEEEIQEL

SEQ ID NO: 8514 - protein, 9 aa, synthetic construct
KLIDDVHRL

SEQ ID NO: 8515 - protein, 9 aa, synthetic construct
KLIDRTESL

SEQ ID NO: 8516 - protein, 10 aa, synthetic construct
KLIEKLDIKL

SEQ ID NO: 8517 - protein, 11 aa, synthetic construct
KLIGEYGLRNK

SEQ ID NO: 8518 - protein, 9 aa, synthetic construct
KLIINSLYK

SEQ ID NO: 8519 - protein, 9 aa, synthetic construct
KLIPQLPTL

SEQ ID NO: 8520 - protein, 9 aa, synthetic construct
KLLDAYLLY

SEQ ID NO: 8521 - protein, 9 aa, synthetic construct
KLLDEVTYL

SEQ ID NO: 8522 - protein, 11 aa, synthetic construct
KLLDFGSLSNL

SEQ ID NO: 8523 - protein, 9 aa, synthetic construct
KLLDIRSYL

SEQ ID NO: 8524 - protein, 9 aa, synthetic construct
KLLDLQVRV

SEQ ID NO: 8525 - protein, 9 aa, synthetic construct
KLLDLMPRL

SEQ ID NO: 8526 - protein, 9 aa, synthetic construct
KLLELFEAI

SEQ ID NO: 8527 - protein, 9 aa, synthetic construct
KLLEPVLLL

SEQ ID NO: 8528 - protein, 9 aa, synthetic construct
KLLEQALVI

SEQ ID NO: 8529 - protein, 9 aa, synthetic construct
KLLFWVTEV

SEQ ID NO: 8530 - protein, 9 aa, synthetic construct
KLLPSVVLK

SEQ ID NO: 8531 - protein, 9 aa, synthetic construct
KLLSGVLFH

SEQ ID NO: 8532 - protein, 9 aa, synthetic construct
KLNPQQFEV

SEQ ID NO: 8533 - protein, 10 aa, synthetic construct
KLPEFTKSEY

SEQ ID NO: 8534 - protein, 9 aa, synthetic construct
KLPEKWESV

SEQ ID NO: 8535 - protein, 8 aa, synthetic construct
KLPEMDID

SEQ ID NO: 8536 - protein, 9 aa, synthetic construct
KLPGNISSL

SEQ ID NO: 8537 - protein, 10 aa, synthetic construct
KLPNYDAREI

SEQ ID NO: 8538 - protein, 9 aa, synthetic construct
KLQEFLQTL

SEQ ID NO: 8539 - protein, 9 aa, synthetic construct
KLSDLLKYY

SEQ ID NO: 8540 - protein, 9 aa, synthetic construct
KLSDLQTQL

SEQ ID NO: 8541 - protein, 9 aa, synthetic construct
KLSELQLRV

SEQ ID NO: 8542 - protein, 8 aa, synthetic construct
KLSKKKKG

SEQ ID NO: 8543 - protein, 8 aa, synthetic construct
KLTLLLMW

SEQ ID NO: 8544 - protein, 9 aa, synthetic construct
KLVDFVIHF

SEQ ID NO: 8545 - protein, 10 aa, synthetic construct
KLWDIINVNI

SEQ ID NO: 8546 - protein, 9 aa, synthetic construct
KLWDLLYKL

SEQ ID NO: 8547 - protein, 9 aa, synthetic construct
KLWGQSIQL

SEQ ID NO: 8548 - protein, 10 aa, synthetic construct
KLYAGAILEV

SEQ ID NO: 8549 - protein, 9 aa, synthetic construct
KLYDGFQYL

SEQ ID NO: 8550 - protein, 8 aa, synthetic construct
KLYEKKLL

SEQ ID NO: 8551 - protein, 9 aa, synthetic construct
KLYGKPIRV

SEQ ID NO: 8552 - protein, 9 aa, synthetic construct
KLYGRPIKI

SEQ ID NO: 8553 - protein, 9 aa, synthetic construct
KLYLPTGPR

SEQ ID NO: 8554 - protein, 9 aa, synthetic construct
KLYTGLREV

SEQ ID NO: 8555 - protein, 9 aa, synthetic construct
KMDDLNLHY

SEQ ID NO: 8556 - protein, 9 aa, synthetic construct
KMFEVDMKI

SEQ ID NO: 8557 - protein, 9 aa, synthetic construct
KMKDGVVYV

SEQ ID NO: 8558 - protein, 9 aa, synthetic construct
KMLDKIMII

SEQ ID NO: 8559 - protein, 11 aa, synthetic construct
KPAGPPGILAL

SEQ ID NO: 8560 - protein, 9 aa, synthetic construct
KPASFMTSI

SEQ ID NO: 8561 - protein, 9 aa, synthetic construct
KPFEAFLSF

SEQ ID NO: 8562 - protein, 8 aa, synthetic construct
KPFFKKKL

SEQ ID NO: 8563 - protein, 11 aa, synthetic construct
KPFFKKKLTSL

SEQ ID NO: 8564 - protein, 9 aa, synthetic construct
KPGAPLQAF

SEQ ID NO: 8565 - protein, 9 aa, synthetic construct
KPHNILISM

SEQ ID NO: 8566 - protein, 10 aa, synthetic construct
KPHSGFHVAF

SEQ ID NO: 8567 - protein, 9 aa, synthetic construct
KPIEPRREL

SEQ ID NO: 8568 - protein, 10 aa, synthetic construct
KPIEPRRELL

SEQ ID NO: 8569 - protein, 9 aa, synthetic construct
KPIESFNEY

SEQ ID NO: 8570 - protein, 9 aa, synthetic construct
KPIPANQEL

SEQ ID NO: 8571 - protein, 9 aa, synthetic construct
KPKAPPPSL

SEQ ID NO: 8572 - protein, 10 aa, synthetic construct
KPKDPLKISL

SEQ ID NO: 8573 - protein, 9 aa, synthetic construct
KPKFSGFTF

SEQ ID NO: 8574 - protein, 10 aa, synthetic construct
KPKSAPWNSF

SEQ ID NO: 8575 - protein, 10 aa, synthetic construct
KPKTPSLTVF

SEQ ID NO: 8576 - protein, 9 aa, synthetic construct
KPLEKPLKL

SEQ ID NO: 8577 - protein, 9 aa, synthetic construct
KPLGPTAAF

SEQ ID NO: 8578 - protein, 10 aa, synthetic construct
KPLLESGTLG

SEQ ID NO: 8579 - protein, 11 aa, synthetic construct
KPLVIIAEDVD

SEQ ID NO: 8580 - protein, 11 aa, synthetic construct
KPNEFASQINL

SEQ ID NO: 8581 - protein, 9 aa, synthetic construct
KPNGLILQY

SEQ ID NO: 8582 - protein, 9 aa, synthetic construct
KPPSPGTVL

SEQ ID NO: 8583 - protein, 9 aa, synthetic construct
KPQTKLLIL

SEQ ID NO: 8584 - protein, 10 aa, synthetic construct
KPRAGTEIRF

SEQ ID NO: 8585 - protein, 10 aa, synthetic construct
KPRDLFIAKL

SEQ ID NO: 8586 - protein, 10 aa, synthetic construct
KPRDVSSVEL

SEQ ID NO: 8587 - protein, 9 aa, synthetic construct
KPREFALAL

SEQ ID NO: 8588 - protein, 9 aa, synthetic construct
KPRGFARGL

SEQ ID NO: 8589 - protein, 9 aa, synthetic construct
KPRPIIPML

SEQ ID NO: 8590 - protein, 10 aa, synthetic construct
KPRPPQGLVR

SEQ ID NO: 8591 - protein, 9 aa, synthetic construct
KPRQPTIDL

SEQ ID NO: 8592 - protein, 9 aa, synthetic construct
KPRQVTVKL

SEQ ID NO: 8593 - protein, 9 aa, synthetic construct
KPRSLQTGF

SEQ ID NO: 8594 - protein, 9 aa, synthetic construct
KPRSPVVEL

SEQ ID NO: 8595 - protein, 10 aa, synthetic construct
KPRTVFSDYL

SEQ ID NO: 8596 - protein, 9 aa, synthetic construct
KPRVTPVEV

SEQ ID NO: 8597 - protein, 10 aa, synthetic construct
KPSESIYSAL

SEQ ID NO: 8598 - protein, 9 aa, synthetic construct
KPSKWWTCF

SEQ ID NO: 8599 - protein, 9 aa, synthetic construct
KPSLPFTSL

SEQ ID NO: 8600 - protein, 9 aa, synthetic construct
KPSPKTIAF

SEQ ID NO: 8601 - protein, 11 aa, synthetic construct
KPSSKALGTSL

SEQ ID NO: 8602 - protein, 9 aa, synthetic construct
KPVYPGQTL

SEQ ID NO: 8603 - protein, 11 aa, synthetic construct
KPYNPILGETF

SEQ ID NO: 8604 - protein, 10 aa, synthetic construct
KPYPEDPAVY

SEQ ID NO: 8605 - protein, 9 aa, synthetic construct
KPYQTMLVL

SEQ ID NO: 8606 - protein, 9 aa, synthetic construct
KPYSGGLCL

SEQ ID NO: 8607 - protein, 9 aa, synthetic construct
KPYSPLASL

SEQ ID NO: 8608 - protein, 11 aa, synthetic construct
KPYTPVSGSLL

SEQ ID NO: 8609 - protein, 8 aa, synthetic construct
KPMEKISL

SEQ ID NO: 8610 - protein, 10 aa, synthetic construct
KQFGGLPEFY

SEQ ID NO: 8611 - protein, 9 aa, synthetic construct
KQFLMKVLI

SEQ ID NO: 8612 - protein, 9 aa, synthetic construct
KQFLVKVLI

SEQ ID NO: 8613 - protein, 9 aa, synthetic construct
KQIFETIYY

SEQ ID NO: 8614 - protein, 8 aa, synthetic construct
KQMRILHV

SEQ ID NO: 8615 - protein, 8 aa, synthetic construct
KQMRILMV

SEQ ID NO: 8616 - protein, 9 aa, synthetic construct
KQYDSILRV

SEQ ID NO: 8617 - protein, 10 aa, synthetic construct
KRADIQLNSF

SEQ ID NO: 8618 - protein, 9 aa, synthetic construct
KRASVFVKL

SEQ ID NO: 8619 - protein, 9 aa, synthetic construct
KRASYILRL

SEQ ID NO: 8620 - protein, 10 aa, synthetic construct
KRFDDKYTLK

SEQ ID NO: 8621 - protein, 10 aa, synthetic construct
KRFDFDYTTM

SEQ ID NO: 8622 - protein, 11 aa, synthetic construct
KRFDHSEIYTY

SEQ ID NO: 8623 - protein, 9 aa, synthetic construct
KRFEGLTAR

SEQ ID NO: 8624 - protein, 10 aa, synthetic construct
KRFEIIKEAY

SEQ ID NO: 8625 - protein, 9 aa, synthetic construct
KRFGLNIDR

SEQ ID NO: 8626 - protein, 10 aa, synthetic construct
KRFGLNIDRW

SEQ ID NO: 8627 - protein, 9 aa, synthetic construct
KRFHATVSF

SEQ ID NO: 8628 - protein, 11 aa, synthetic construct
KRFKVSDEVGF

SEQ ID NO: 8629 - protein, 9 aa, synthetic construct
KRFLLLFTF

SEQ ID NO: 8630 - protein, 10 aa, synthetic construct
KRFQQAGFNL

SEQ ID NO: 8631 - protein, 11 aa, synthetic construct
KRFQQAGFNLR

SEQ ID NO: 8632 - protein, 10 aa, synthetic construct
KRFQVAVNLA

SEQ ID NO: 8633 - protein, 9 aa, synthetic construct
KRFSFKKSF

SEQ ID NO: 8634 - protein, 9 aa, synthetic construct
KRFSGTVRL

SEQ ID NO: 8635 - protein, 10 aa, synthetic construct
KRFSVPVQHF

SEQ ID NO: 8636 - protein, 10 aa, synthetic construct
KRHDLVKLGF

SEQ ID NO: 8637 - protein, 10 aa, synthetic construct
KRIALTDNAL

SEQ ID NO: 8638 - protein, 9 aa, synthetic construct
KRIDIIHNL

SEQ ID NO: 8639 - protein, 9 aa, synthetic construct
KRIDIMVGM

SEQ ID NO: 8640 - protein, 9 aa, synthetic construct
KRILNIYRY

SEQ ID NO: 8641 - protein, 9 aa, synthetic construct
KRINWRTVL

SEQ ID NO: 8642 - protein, 11 aa, synthetic construct
KRISEQFTAMF

SEQ ID NO: 8643 - protein, 9 aa, synthetic construct
KRKGQVIQF

SEQ ID NO: 8644 - protein, 9 aa, synthetic construct
KRKVLILTL

SEQ ID NO: 8645 - protein, 9 aa, synthetic construct
KRLAACVNL

SEQ ID NO: 8646 - protein, 11 aa, synthetic construct
KRLAQVKLLNR

SEQ ID NO: 8647 - protein, 10 aa, synthetic construct
KRLDLTTSAF

SEQ ID NO: 8648 - protein, 9 aa, synthetic construct
KRLDVEFVL

SEQ ID NO: 8649 - protein, 9 aa, synthetic construct
KRLEIEKSL

SEQ ID NO: 8650 - protein, 9 aa, synthetic construct
KRLGILVVF

SEQ ID NO: 8651 - protein, 9 aa, synthetic construct
KRLGLLAGF

SEQ ID NO: 8652 - protein, 10 aa, synthetic construct
KRLGLLAGFA

SEQ ID NO: 8653 - protein, 11 aa, synthetic construct
KRLGLLAGFAF

SEQ ID NO: 8654 - protein, 10 aa, synthetic construct
KRLGYIHRNF

SEQ ID NO: 8655 - protein, 9 aa, synthetic construct
KRLNFITEY

SEQ ID NO: 8656 - protein, 9 aa, synthetic construct
KRLTVQTKF

SEQ ID NO: 8657 - protein, 11 aa, synthetic construct
KRLVQSPNSYF

SEQ ID NO: 8658 - protein, 9 aa, synthetic construct
KRLVVFDAR

SEQ ID NO: 8659 - protein, 9 aa, synthetic construct
KRNDYVHAL

SEQ ID NO: 8660 - protein, 11 aa, synthetic construct
KRNEFLGELQK

SEQ ID NO: 8661 - protein, 9 aa, synthetic construct
KRNELVIRV

SEQ ID NO: 8662 - protein, 9 aa, synthetic construct
KRPNAILKL

SEQ ID NO: 8663 - protein, 9 aa, synthetic construct
KRPVFIFEW

SEQ ID NO: 8664 - protein, 9 aa, synthetic construct
KRSNYITRL

SEQ ID NO: 8665 - protein, 9 aa, synthetic construct
KRTELEAKL

SEQ ID NO: 8666 - protein, 9 aa, synthetic construct
KRTFPVLLR

SEQ ID NO: 8667 - protein, 9 aa, synthetic construct
KRTLLIKTV

SEQ ID NO: 8668 - protein, 9 aa, synthetic construct
KRTTVVAQL

SEQ ID NO: 8669 - protein, 10 aa, synthetic construct
KRVAVILNEF

SEQ ID NO: 8670 - protein, 9 aa, synthetic construct
KRVDLLEQV

SEQ ID NO: 8671 - protein, 9 aa, synthetic construct
KRVEDAYIL

SEQ ID NO: 8672 - protein, 9 aa, synthetic construct
KRVFPKWTY

SEQ ID NO: 8673 - protein, 10 aa, synthetic construct
KRVYIAYSTF

SEQ ID NO: 8674 - protein, 9 aa, synthetic construct
KRWEGLVHI

SEQ ID NO: 8675 - protein, 9 aa, synthetic construct
KRWESERIL

SEQ ID NO: 8676 - protein, 10 aa, synthetic construct
KRWQAIYKQF

SEQ ID NO: 8677 - protein, 10 aa, synthetic construct
KRYAVPSAGL

SEQ ID NO: 8678 - protein, 9 aa, synthetic construct
KRYHIAKVY

SEQ ID NO: 8679 - protein, 9 aa, synthetic construct
KRYPGFMRV

SEQ ID NO: 8680 - protein, 11 aa, synthetic construct
KRYQQAWEDVK

SEQ ID NO: 8681 - protein, 9 aa, synthetic construct
KRMSGMIRL

SEQ ID NO: 8682 - protein, 9 aa, synthetic construct
KSDVHLNFY

SEQ ID NO: 8683 - protein, 9 aa, synthetic construct
KSFEGLFYF

SEQ ID NO: 8684 - protein, 9 aa, synthetic construct
KSFSFVRVI

SEQ ID NO: 8685 - protein, 10 aa, synthetic construct
KSFSVILEHF

SEQ ID NO: 8686 - protein, 9 aa, synthetic construct
KSIDFPLTK

SEQ ID NO: 8687 - protein, 9 aa, synthetic construct
KSIHIVVTM

SEQ ID NO: 8688 - protein, 9 aa, synthetic construct
KSSEVFTTF

SEQ ID NO: 8689 - protein, 11 aa, synthetic construct
KTAEDAKDFFK

SEQ ID NO: 8690 - protein, 10 aa, synthetic construct
KTCSVCITEY

SEQ ID NO: 8691 - protein, 10 aa, synthetic construct
KTDDLTMVLY

SEQ ID NO: 8692 - protein, 9 aa, synthetic construct
KTDHFIFTY

SEQ ID NO: 8693 - protein, 9 aa, synthetic construct
KTDLDLQQY

SEQ ID NO: 8694 - protein, 11 aa, synthetic construct
KTEDPDLPAFY

SEQ ID NO: 8695 - protein, 10 aa, synthetic construct
KTEVNSGFFY

SEQ ID NO: 8696 - protein, 11 aa, synthetic construct
KTIDDLKNQIL

SEQ ID NO: 8697 - protein, 9 aa, synthetic construct
KTIDYIQFL

SEQ ID NO: 8698 - protein, 9 aa, synthetic construct
KTLQDIVYK

SEQ ID NO: 8699 - protein, 9 aa, synthetic construct
KTLYPIIGK

SEQ ID NO: 8700 - protein, 9 aa, synthetic construct
KTPDFILQV

SEQ ID NO: 8701 - protein, 9 aa, synthetic construct
KTSDFLKVL

SEQ ID NO: 8702 - protein, 10 aa, synthetic construct
KTTAQVLIRF

SEQ ID NO: 8703 - protein, 11 aa, synthetic construct
KTVSPRELAVE

SEQ ID NO: 8704 - protein, 9 aa, synthetic construct
KVADMALHY

SEQ ID NO: 8705 - protein, 9 aa, synthetic construct
KVAVVLIQK

SEQ ID NO: 8706 - protein, 9 aa, synthetic construct
KVCDIYINY

SEQ ID NO: 8707 - protein, 10 aa, synthetic construct
KVFDGIPPPY

SEQ ID NO: 8708 - protein, 10 aa, synthetic construct
KVFSGALQEA

SEQ ID NO: 8709 - protein, 9 aa, synthetic construct
KVHAYIISY

SEQ ID NO: 8710 - protein, 9 aa, synthetic construct
KVIDEIYRV

SEQ ID NO: 8711 - protein, 9 aa, synthetic construct
KVIEINPYL

SEQ ID NO: 8712 - protein, 10 aa, synthetic construct
KVLDAIIQEK

SEQ ID NO: 8713 - protein, 9 aa, synthetic construct
KVLDFEHFL

SEQ ID NO: 8714 - protein, 9 aa, synthetic construct
KVLDKLLLY

SEQ ID NO: 8715 - protein, 9 aa, synthetic construct
KVLDKVFRA

SEQ ID NO: 8716 - protein, 9 aa, synthetic construct
KVLDLKINL

SEQ ID NO: 8717 - protein, 9 aa, synthetic construct
KVLDLRINL

SEQ ID NO: 8718 - protein, 11 aa, synthetic construct
KVLDTIMATKL

SEQ ID NO: 8719 - protein, 10 aa, synthetic construct
KVLENIELNK

SEQ ID NO: 8720 - protein, 9 aa, synthetic construct
KVLSKEFHL

SEQ ID NO: 8721 - protein, 10 aa, synthetic construct
KVNIIPIIAK

SEQ ID NO: 8722 - protein, 10 aa, synthetic construct
KVNIVPVIAK

SEQ ID NO: 8723 - protein, 10 aa, synthetic construct
KVNNFPPLPK

SEQ ID NO: 8724 - protein, 9 aa, synthetic construct
KVPTFVRML

SEQ ID NO: 8725 - protein, 10 aa, synthetic construct
KVVEGSFVYK

SEQ ID NO: 8726 - protein, 9 aa, synthetic construct
KVYNIQIRY

SEQ ID NO: 8727 - protein, 9 aa, synthetic construct
KVYTHNLYY

SEQ ID NO: 8728 - protein, 9 aa, synthetic construct
KVMELLVHL

SEQ ID NO: 8729 - protein, 9 aa, synthetic construct
KVMNIRTVL

SEQ ID NO: 8730 - protein, 9 aa, synthetic construct
KVMQQNLVY

SEQ ID NO: 8731 - protein, 9 aa, synthetic construct
KYDNMAELF

SEQ ID NO: 8732 - protein, 9 aa, synthetic construct
KYDQLKVYL

SEQ ID NO: 8733 - protein, 8 aa, synthetic construct
KYEELQIT

SEQ ID NO: 8734 - protein, 9 aa, synthetic construct
KYESIRLLF

SEQ ID NO: 8735 - protein, 9 aa, synthetic construct
KYFLQQWEL

SEQ ID NO: 8736 - protein, 8 aa, synthetic construct
KYGPIRQI

SEQ ID NO: 8737 - protein, 9 aa, synthetic construct
KYIDQKFVL

SEQ ID NO: 8738 - protein, 9 aa, synthetic construct
KYIDRLIQL

SEQ ID NO: 8739 - protein, 9 aa, synthetic construct
KYIGENLQL

SEQ ID NO: 8740 - protein, 9 aa, synthetic construct
KYIHSANVL

SEQ ID NO: 8741 - protein, 9 aa, synthetic construct
KYINTDAKF

SEQ ID NO: 8742 - protein, 9 aa, synthetic construct
KYITDVVKL

SEQ ID NO: 8743 - protein, 10 aa, synthetic construct
KYITDWQNVF

SEQ ID NO: 8744 - protein, 9 aa, synthetic construct
KYKDIYTEL

SEQ ID NO: 8745 - protein, 11 aa, synthetic construct
KYLDEDTIYHL

SEQ ID NO: 8746 - protein, 9 aa, synthetic construct
KYLEMIYSM

SEQ ID NO: 8747 - protein, 9 aa, synthetic construct
KYLGQLHYL

SEQ ID NO: 8748 - protein, 9 aa, synthetic construct
KYLSGIAHF

SEQ ID NO: 8749 - protein, 10 aa, synthetic construct
KYLSVQGQLF

SEQ ID NO: 8750 - protein, 10 aa, synthetic construct
KYLVIGDLLF

SEQ ID NO: 8751 - protein, 9 aa, synthetic construct
KYLYVDKNF

SEQ ID NO: 8752 - protein, 9 aa, synthetic construct
KYMDINFDF

SEQ ID NO: 8753 - protein, 11 aa, synthetic construct
KYMPNVKVAVF

SEQ ID NO: 8754 - protein, 9 aa, synthetic construct
KYMTAVVKL

SEQ ID NO: 8755 - protein, 9 aa, synthetic construct
KYNANFVTF

SEQ ID NO: 8756 - protein, 9 aa, synthetic construct
KYNPTWHCI

SEQ ID NO: 8757 - protein, 9 aa, synthetic construct
KYPENFFLL

SEQ ID NO: 8758 - protein, 9 aa, synthetic construct
KYPSPFFVF

SEQ ID NO: 8759 - protein, 9 aa, synthetic construct
KYQEEFEHF

SEQ ID NO: 8760 - protein, 9 aa, synthetic construct
KYQELQVLF

SEQ ID NO: 8761 - protein, 9 aa, synthetic construct
KYQIINEEF

SEQ ID NO: 8762 - protein, 9 aa, synthetic construct
KYQKGFSLW

SEQ ID NO: 8763 - protein, 9 aa, synthetic construct
KYSDITIMF

SEQ ID NO: 8764 - protein, 9 aa, synthetic construct
KYTKIFNDF

SEQ ID NO: 8765 - protein, 9 aa, synthetic construct
KYVGLVRVL

SEQ ID NO: 8766 - protein, 9 aa, synthetic construct
KYVTVYNLI

SEQ ID NO: 8767 - protein, 9 aa, synthetic construct
KYYRQTLLF

SEQ ID NO: 8768 - protein, 9 aa, synthetic construct
KYMDIEFDF

SEQ ID NO: 8769 - protein, 10 aa, synthetic construct
KYMTAVVKLF

SEQ ID NO: 8770 - protein, 9 aa, synthetic construct
KMAEMLVEL

SEQ ID NO: 8771 - protein, 9 aa, synthetic construct
KMDPIISRV

SEQ ID NO: 8772 - protein, 9 aa, synthetic construct
KMFSDEILL

SEQ ID NO: 8773 - protein, 8 aa, synthetic construct
KMGLIFEV

SEQ ID NO: 8774 - protein, 9 aa, synthetic construct
KMWEEAISL

SEQ ID NO: 8775 - protein, 10 aa, synthetic construct
KMYDAAKLLY

SEQ ID NO: 8776 - protein, 9 aa, synthetic construct
LAALPGVSL

SEQ ID NO: 8777 - protein, 8 aa, synthetic construct
LAALSWQY

SEQ ID NO: 8778 - protein, 9 aa, synthetic construct
LAAPICLLY

SEQ ID NO: 8779 - protein, 9 aa, synthetic construct
LAAPPGHQL

SEQ ID NO: 8780 - protein, 9 aa, synthetic construct
LADAINTEF

SEQ ID NO: 8781 - protein, 9 aa, synthetic construct
LADELITVY

SEQ ID NO: 8782 - protein, 9 aa, synthetic construct
LADLSCLVY

SEQ ID NO: 8783 - protein, 9 aa, synthetic construct
LADNAIIIY

SEQ ID NO: 8784 - protein, 10 aa, synthetic construct
LADTLFSKGL

SEQ ID NO: 8785 - protein, 9 aa, synthetic construct
LAEVEAVAP

SEQ ID NO: 8786 - protein, 9 aa, synthetic construct
LAFGETIEF

SEQ ID NO: 8787 - protein, 9 aa, synthetic construct
LAFPGEMLL

SEQ ID NO: 8788 - protein, 10 aa, synthetic construct
LAHFCTSLQG

SEQ ID NO: 8789 - protein, 8 aa, synthetic construct
LAHLKMSL

SEQ ID NO: 8790 - protein, 9 aa, synthetic construct
LAHNNFVGR

SEQ ID NO: 8791 - protein, 9 aa, synthetic construct
LAIGASFTV

SEQ ID NO: 8792 - protein, 9 aa, synthetic construct
LAIPITNTY

SEQ ID NO: 8793 - protein, 9 aa, synthetic construct
LAIYDTMQY

SEQ ID NO: 8794 - protein, 8 aa, synthetic construct
LAKLRQEL

SEQ ID NO: 8795 - protein, 8 aa, synthetic construct
LAKVKSLL

SEQ ID NO: 8796 - protein, 9 aa, synthetic construct
LALEPGVAY

SEQ ID NO: 8797 - protein, 9 aa, synthetic construct
LALFPGVAL

SEQ ID NO: 8798 - protein, 11 aa, synthetic construct
LALITQAVQSE

SEQ ID NO: 8799 - protein, 8 aa, synthetic construct
LALVRQQL

SEQ ID NO: 8800 - protein, 10 aa, synthetic construct
LAPDYDALDV

SEQ ID NO: 8801 - protein, 9 aa, synthetic construct
LAPEFLESL

SEQ ID NO: 8802 - protein, 9 aa, synthetic construct
LAPLHSSAI

SEQ ID NO: 8803 - protein, 9 aa, synthetic construct
LAPLTYISL

SEQ ID NO: 8804 - protein, 9 aa, synthetic construct
LAPSGDLSL

SEQ ID NO: 8805 - protein, 9 aa, synthetic construct
LAPTREIAV

SEQ ID NO: 8806 - protein, 9 aa, synthetic construct
LAQEDLVGL

SEQ ID NO: 8807 - protein, 11 aa, synthetic construct
LAQHITYVHQH

SEQ ID NO: 8808 - protein, 9 aa, synthetic construct
LASEIYDIL

SEQ ID NO: 8809 - protein, 9 aa, synthetic construct
LASKEIHQF

SEQ ID NO: 8810 - protein, 10 aa, synthetic construct
LASQYTSYAI

SEQ ID NO: 8811 - protein, 9 aa, synthetic construct
LASMRAILE

SEQ ID NO: 8812 - protein, 9 aa, synthetic construct
LATAAALTY

SEQ ID NO: 8813 - protein, 9 aa, synthetic construct
LATEVVTVF

SEQ ID NO: 8814 - protein, 10 aa, synthetic construct
LAVFIKAVHV

SEQ ID NO: 8815 - protein, 9 aa, synthetic construct
LAWLDEHTL

SEQ ID NO: 8816 - protein, 8 aa, synthetic construct
LDIKIRLE

SEQ ID NO: 8817 - protein, 10 aa, synthetic construct
LDNSVFSEHR

SEQ ID NO: 8818 - protein, 11 aa, synthetic construct
LDPEISSGEGL

SEQ ID NO: 8819 - protein, 9 aa, synthetic construct
LDPHNHVLY

SEQ ID NO: 8820 - protein, 8 aa, synthetic construct
LDPHVVLL

SEQ ID NO: 8821 - protein, 11 aa, synthetic construct
LDSASRLTEQL

SEQ ID NO: 8822 - protein, 10 aa, synthetic construct
LDTNADKQLS

SEQ ID NO: 8823 - protein, 9 aa, synthetic construct
LDVVHPAAK

SEQ ID NO: 8824 - protein, 9 aa, synthetic construct
LEADVNIKL

SEQ ID NO: 8825 - protein, 9 aa, synthetic construct
LEAELHFPA

SEQ ID NO: 8826 - protein, 9 aa, synthetic construct
LEALEQRME

SEQ ID NO: 8827 - protein, 9 aa, synthetic construct
LEAPDLLLA

SEQ ID NO: 8828 - protein, 9 aa, synthetic construct
LECSGVISA

SEQ ID NO: 8829 - protein, 11 aa, synthetic construct
LEDALQQAKED

SEQ ID NO: 8830 - protein, 11 aa, synthetic construct
LEDIVAALPGF

SEQ ID NO: 8831 - protein, 9 aa, synthetic construct
LEDRPRLLP

SEQ ID NO: 8832 - protein, 11 aa, synthetic construct
LEEALQQAKED

SEQ ID NO: 8833 - protein, 9 aa, synthetic construct
LEEDVKIYL

SEQ ID NO: 8834 - protein, 8 aa, synthetic construct
LEEIQSQL

SEQ ID NO: 8835 - protein, 9 aa, synthetic construct
LEEQGSIAL

SEQ ID NO: 8836 - protein, 10 aa, synthetic construct
LEEVHLPNIK

SEQ ID NO: 8837 - protein, 9 aa, synthetic construct
LEFEHQRAP

SEQ ID NO: 8838 - protein, 9 aa, synthetic construct
LEFERWLNA

SEQ ID NO: 8839 - protein, 8 aa, synthetic construct
LEGGQEDF

SEQ ID NO: 8840 - protein, 11 aa, synthetic construct
LEGGQEDFESS

SEQ ID NO: 8841 - protein, 9 aa, synthetic construct
LEHCPFVQC

SEQ ID NO: 8842 - protein, 9 aa, synthetic construct
LEHEGLVSL

SEQ ID NO: 8843 - protein, 9 aa, synthetic construct
LEIATYRTL

SEQ ID NO: 8844 - protein, 10 aa, synthetic construct
LEIEFKETQA

SEQ ID NO: 8845 - protein, 9 aa, synthetic construct
LEIPDILNA

SEQ ID NO: 8846 - protein, 8 aa, synthetic construct
LEIYALEI

SEQ ID NO: 8847 - protein, 9 aa, synthetic construct
LEKIFQNAP

SEQ ID NO: 8848 - protein, 9 aa, synthetic construct
LEKPFSVKA

SEQ ID NO: 8849 - protein, 9 aa, synthetic construct
LELKHFAEA

SEQ ID NO: 8850 - protein, 8 aa, synthetic construct
LEPYFESF

SEQ ID NO: 8851 - protein, 9 aa, synthetic construct
LEQQNKILL

SEQ ID NO: 8852 - protein, 9 aa, synthetic construct
LERDPIPAA

SEQ ID NO: 8853 - protein, 9 aa, synthetic construct
LERFPWPSL

SEQ ID NO: 8854 - protein, 8 aa, synthetic construct
LETSAFVK

SEQ ID NO: 8855 - protein, 9 aa, synthetic construct
LEVEHPAAK

SEQ ID NO: 8856 - protein, 10 aa, synthetic construct
LEVEVIEGTL

SEQ ID NO: 8857 - protein, 10 aa, synthetic construct
LEVFPEFAAA

SEQ ID NO: 8858 - protein, 8 aa, synthetic construct
LEVHQFSR

SEQ ID NO: 8859 - protein, 9 aa, synthetic construct
LEVLVSPTC

SEQ ID NO: 8860 - protein, 8 aa, synthetic construct
LEWCLPVI

SEQ ID NO: 8861 - protein, 8 aa, synthetic construct
LEWPSLTA

SEQ ID NO: 8862 - protein, 10 aa, synthetic construct
LEYDLQQREA

SEQ ID NO: 8863 - protein, 9 aa, synthetic construct
LEYDSLLEV

SEQ ID NO: 8864 - protein, 8 aa, synthetic construct
LEYEARQI

SEQ ID NO: 8865 - protein, 8 aa, synthetic construct
LEYLTAEI

SEQ ID NO: 8866 - protein, 8 aa, synthetic construct
LEYLTAEV

SEQ ID NO: 8867 - protein, 9 aa, synthetic construct
LEYYDFYEV

SEQ ID NO: 8868 - protein, 11 aa, synthetic construct
LFLHSVASALL

SEQ ID NO: 8869 - protein, 8 aa, synthetic construct
LFLRTPKI

SEQ ID NO: 8870 - protein, 8 aa, synthetic construct
LFLSAGTD

SEQ ID NO: 8871 - protein, 9 aa, synthetic construct
LFSGQPLII

SEQ ID NO: 8872 - protein, 10 aa, synthetic construct
LFSSACSKVK

SEQ ID NO: 8873 - protein, 10 aa, synthetic construct
LFSSIFTEAQ

SEQ ID NO: 8874 - protein, 10 aa, synthetic construct
LFSSIMRELA

SEQ ID NO: 8875 - protein, 11 aa, synthetic construct
LGDGPVVTDPK

SEQ ID NO: 8876 - protein, 9 aa, synthetic construct
LGESKTYVI

SEQ ID NO: 8877 - protein, 9 aa, synthetic construct
LGETGIWQL

SEQ ID NO: 8878 - protein, 10 aa, synthetic construct
LGFQGWLETM

SEQ ID NO: 8879 - protein, 8 aa, synthetic construct
LGHGYHTL

SEQ ID NO: 8880 - protein, 9 aa, synthetic construct
LGHGYHTLE

SEQ ID NO: 8881 - protein, 9 aa, synthetic construct
LGLGIDEDD

SEQ ID NO: 8882 - protein, 8 aa, synthetic construct
LGLLENVR

SEQ ID NO: 8883 - protein, 9 aa, synthetic construct
LGLPVGAVI

SEQ ID NO: 8884 - protein, 9 aa, synthetic construct
LGNEVFDVY

SEQ ID NO: 8885 - protein, 9 aa, synthetic construct
LGPPGTSAL

SEQ ID NO: 8886 - protein, 10 aa, synthetic construct
LGVHPLSCHG

SEQ ID NO: 8887 - protein, 9 aa, synthetic construct
LGWPDTIAY

SEQ ID NO: 8888 - protein, 9 aa, synthetic construct
LGMPDPHLY

SEQ ID NO: 8889 - protein, 11 aa, synthetic construct
LHFFMPGFAPL

SEQ ID NO: 8890 - protein, 9 aa, synthetic construct
LHFFMPGFA

SEQ ID NO: 8891 - protein, 8 aa, synthetic construct
LHHVSSLA

SEQ ID NO: 8892 - protein, 10 aa, synthetic construct
LHLELKRCLF

SEQ ID NO: 8893 - protein, 9 aa, synthetic construct
LHPDLGTDK

SEQ ID NO: 8894 - protein, 10 aa, synthetic construct
LIAAHGNSLR

SEQ ID NO: 8895 - protein, 10 aa, synthetic construct
LIAARRTGRL

SEQ ID NO: 8896 - protein, 9 aa, synthetic construct
LIDEQILCV

SEQ ID NO: 8897 - protein, 9 aa, synthetic construct
LIDLAIDTY

SEQ ID NO: 8898 - protein, 9 aa, synthetic construct
LIDVGTGYY

SEQ ID NO: 8899 - protein, 9 aa, synthetic construct
LIFAGKQLE

SEQ ID NO: 8900 - protein, 10 aa, synthetic construct
LIFAGKQLED

SEQ ID NO: 8901 - protein, 8 aa, synthetic construct
LIFRRIYL

SEQ ID NO: 8902 - protein, 9 aa, synthetic construct
LIFSVPIVY

SEQ ID NO: 8903 - protein, 8 aa, synthetic construct
LIHDGLAR

SEQ ID NO: 8904 - protein, 8 aa, synthetic construct
LIQSKCLS

SEQ ID NO: 8905 - protein, 9 aa, synthetic construct
LIRPVSASF

SEQ ID NO: 8906 - protein, 10 aa, synthetic construct
LIVGDAQSRV

SEQ ID NO: 8907 - protein, 8 aa, synthetic construct
LKAFDTYK

SEQ ID NO: 8908 - protein, 9 aa, synthetic construct
LKELPEAQD

SEQ ID NO: 8909 - protein, 8 aa, synthetic construct
LKGPILCF

SEQ ID NO: 8910 - protein, 8 aa, synthetic construct
LKLKLHSF

SEQ ID NO: 8911 - protein, 10 aa, synthetic construct
LKLSPVQKQK

SEQ ID NO: 8912 - protein, 10 aa, synthetic construct
LKQAISIRDH

SEQ ID NO: 8913 - protein, 9 aa, synthetic construct
LKQRKGFVK

SEQ ID NO: 8914 - protein, 9 aa, synthetic construct
LLADELITV

SEQ ID NO: 8915 - protein, 10 aa, synthetic construct
LLAEKVLAGK

SEQ ID NO: 8916 - protein, 9 aa, synthetic construct
LLAEVIENL

SEQ ID NO: 8917 - protein, 10 aa, synthetic construct
LLDDAQRLLY

SEQ ID NO: 8918 - protein, 9 aa, synthetic construct
LLDDFLLTY

SEQ ID NO: 8919 - protein, 9 aa, synthetic construct
LLDDGPTQA

SEQ ID NO: 8920 - protein, 9 aa, synthetic construct
LLDDTGLAY

SEQ ID NO: 8921 - protein, 9 aa, synthetic construct
LLDDTTVTL

SEQ ID NO: 8922 - protein, 10 aa, synthetic construct
LLDKWENVKI

SEQ ID NO: 8923 - protein, 9 aa, synthetic construct
LLDLLSELY

SEQ ID NO: 8924 - protein, 9 aa, synthetic construct
LLDPASFEY

SEQ ID NO: 8925 - protein, 8 aa, synthetic construct
LLDSSLEY

SEQ ID NO: 8926 - protein, 9 aa, synthetic construct
LLDTELDLY

SEQ ID NO: 8927 - protein, 9 aa, synthetic construct
LLDVTPLSL

SEQ ID NO: 8928 - protein, 9 aa, synthetic construct
LLEKEILFY

SEQ ID NO: 8929 - protein, 9 aa, synthetic construct
LLGPPPVGV

SEQ ID NO: 8930 - protein, 9 aa, synthetic construct
LLGPRLVLA

SEQ ID NO: 8931 - protein, 9 aa, synthetic construct
LLHELLTHV

SEQ ID NO: 8932 - protein, 9 aa, synthetic construct
LLIDHRFLL

SEQ ID NO: 8933 - protein, 9 aa, synthetic construct
LLIENVASL

SEQ ID NO: 8934 - protein, 9 aa, synthetic construct
LLIPGLATA

SEQ ID NO: 8935 - protein, 8 aa, synthetic construct
LLKPELLR

SEQ ID NO: 8936 - protein, 8 aa, synthetic construct
LLKVNQEL

SEQ ID NO: 8937 - protein, 9 aa, synthetic construct
LLLDRNQPE

SEQ ID NO: 8938 - protein, 10 aa, synthetic construct
LLLDVPTAAV

SEQ ID NO: 8939 - protein, 9 aa, synthetic construct
LLLDMQNRL

SEQ ID NO: 8940 - protein, 9 aa, synthetic construct
LLLERNFHP

SEQ ID NO: 8941 - protein, 10 aa, synthetic construct
LLLGFSEHPG

SEQ ID NO: 8942 - protein, 8 aa, synthetic construct
LLLLPSVC

SEQ ID NO: 8943 - protein, 9 aa, synthetic construct
LLLTKERYI

SEQ ID NO: 8944 - protein, 8 aa, synthetic construct
LLPAIVHI

SEQ ID NO: 8945 - protein, 9 aa, synthetic construct
LLPEHFLFL

SEQ ID NO: 8946 - protein, 9 aa, synthetic construct
LLPEHVLVK

SEQ ID NO: 8947 - protein, 8 aa, synthetic construct
LLPGELAK

SEQ ID NO: 8948 - protein, 9 aa, synthetic construct
LLPPPPCPA

SEQ ID NO: 8949 - protein, 10 aa, synthetic construct
LLQPLNVKVD

SEQ ID NO: 8950 - protein, 9 aa, synthetic construct
LLQVQHASK

SEQ ID NO: 8951 - protein, 8 aa, synthetic construct
LLREKVGL

SEQ ID NO: 8952 - protein, 8 aa, synthetic construct
LLRQLLKL

SEQ ID NO: 8953 - protein, 9 aa, synthetic construct
LLSAEPVPA

SEQ ID NO: 8954 - protein, 10 aa, synthetic construct
LLSGSPFKAS

SEQ ID NO: 8955 - protein, 10 aa, synthetic construct
LLTEAPLNPK

SEQ ID NO: 8956 - protein, 9 aa, synthetic construct
LLYEKNLVK

SEQ ID NO: 8957 - protein, 9 aa, synthetic construct
LLYESKLYK

SEQ ID NO: 8958 - protein, 10 aa, synthetic construct
LLYQGPHNTL

SEQ ID NO: 8959 - protein, 9 aa, synthetic construct
LLMATILHL

SEQ ID NO: 8960 - protein, 9 aa, synthetic construct
LLMTSLTES

SEQ ID NO: 8961 - protein, 8 aa, synthetic construct
LMEHIHKL

SEQ ID NO: 8962 - protein, 10 aa, synthetic construct
LNDLAKTENT

SEQ ID NO: 8963 - protein, 8 aa, synthetic construct
LNFSHGTH

SEQ ID NO: 8964 - protein, 9 aa, synthetic construct
LNFSHGTHE

SEQ ID NO: 8965 - protein, 11 aa, synthetic construct
LNFSHGTHEYH

SEQ ID NO: 8966 - protein, 8 aa, synthetic construct
LNLIATAG

SEQ ID NO: 8967 - protein, 11 aa, synthetic construct
LNNMRSQYEQL

SEQ ID NO: 8968 - protein, 11 aa, synthetic construct
LPAAGVGDMVM

SEQ ID NO: 8969 - protein, 11 aa, synthetic construct
LPADISTGIYY

SEQ ID NO: 8970 - protein, 9 aa, synthetic construct
LPAEFFEVL

SEQ ID NO: 8971 - protein, 9 aa, synthetic construct
LPAEHQFSF

SEQ ID NO: 8972 - protein, 9 aa, synthetic construct
LPAFKRKTL

SEQ ID NO: 8973 - protein, 9 aa, synthetic construct
LPAGSRVEL

SEQ ID NO: 8974 - protein, 8 aa, synthetic construct
LPAHTVII

SEQ ID NO: 8975 - protein, 11 aa, synthetic construct
LPAKDIQTNVY

SEQ ID NO: 8976 - protein, 9 aa, synthetic construct
LPALFGATL

SEQ ID NO: 8977 - protein, 9 aa, synthetic construct
LPALFTDLY

SEQ ID NO: 8978 - protein, 11 aa, synthetic construct
LPALLRSGLTL

SEQ ID NO: 8979 - protein, 11 aa, synthetic construct
LPALLVGANTF

SEQ ID NO: 8980 - protein, 10 aa, synthetic construct
LPALPISITF

SEQ ID NO: 8981 - protein, 10 aa, synthetic construct
LPAPELPEAF

SEQ ID NO: 8982 - protein, 9 aa, synthetic construct
LPAPKWTEL

SEQ ID NO: 8983 - protein, 9 aa, synthetic construct
LPAPPKIYF

SEQ ID NO: 8984 - protein, 9 aa, synthetic construct
LPAPVLVVL

SEQ ID NO: 8985 - protein, 10 aa, synthetic construct
LPAQATEYAF

SEQ ID NO: 8986 - protein, 9 aa, synthetic construct
LPAQPASTF

SEQ ID NO: 8987 - protein, 9 aa, synthetic construct
LPAQQVHNY

SEQ ID NO: 8988 - protein, 9 aa, synthetic construct
LPAQSAATL

SEQ ID NO: 8989 - protein, 9 aa, synthetic construct
LPAQTSLEY

SEQ ID NO: 8990 - protein, 9 aa, synthetic construct
LPAQVPMEY

SEQ ID NO: 8991 - protein, 9 aa, synthetic construct
LPAREATQF

SEQ ID NO: 8992 - protein, 9 aa, synthetic construct
LPASGLDIF

SEQ ID NO: 8993 - protein, 9 aa, synthetic construct
LPASGQIAL

SEQ ID NO: 8994 - protein, 9 aa, synthetic construct
LPASPSVSL

SEQ ID NO: 8995 - protein, 9 aa, synthetic construct
LPATILTSL

SEQ ID NO: 8996 - protein, 9 aa, synthetic construct
LPAVGEHVF

SEQ ID NO: 8997 - protein, 9 aa, synthetic construct
LPAYGRTTL

SEQ ID NO: 8998 - protein, 9 aa, synthetic construct
LPCEVKVVA

SEQ ID NO: 8999 - protein, 9 aa, synthetic construct
LPCHLFPTM

SEQ ID NO: 9000 - protein, 9 aa, synthetic construct
LPCKDAPEL

SEQ ID NO: 9001 - protein, 9 aa, synthetic construct
LPDARYSAL

SEQ ID NO: 9002 - protein, 11 aa, synthetic construct
LPDDWDNRTSY

SEQ ID NO: 9003 - protein, 9 aa, synthetic construct
LPDERTISL

SEQ ID NO: 9004 - protein, 10 aa, synthetic construct
LPDEVENPGM

SEQ ID NO: 9005 - protein, 11 aa, synthetic construct
LPDGNAKPYVY

SEQ ID NO: 9006 - protein, 9 aa, synthetic construct
LPDIKVLTL

SEQ ID NO: 9007 - protein, 9 aa, synthetic construct
LPDKTIASL

SEQ ID NO: 9008 - protein, 10 aa, synthetic construct
LPDLNHSQVY

SEQ ID NO: 9009 - protein, 11 aa, synthetic construct
LPDLQRSKQAL

SEQ ID NO: 9010 - protein, 9 aa, synthetic construct
LPDPLQEPY

SEQ ID NO: 9011 - protein, 9 aa, synthetic construct
LPDPQNISL

SEQ ID NO: 9012 - protein, 9 aa, synthetic construct
LPDTQITSY

SEQ ID NO: 9013 - protein, 9 aa, synthetic construct
LPDMTGSVY

SEQ ID NO: 9014 - protein, 9 aa, synthetic construct
LPEDFAVVF

SEQ ID NO: 9015 - protein, 9 aa, synthetic construct
LPEERNSSL

SEQ ID NO: 9016 - protein, 9 aa, synthetic construct
LPEFLTHQY

SEQ ID NO: 9017 - protein, 10 aa, synthetic construct
LPENTFIVGY

SEQ ID NO: 9018 - protein, 11 aa, synthetic construct
LPEPLMTFDLY

SEQ ID NO: 9019 - protein, 9 aa, synthetic construct
LPESAPLIY

SEQ ID NO: 9020 - protein, 9 aa, synthetic construct
LPFAAAGAL

SEQ ID NO: 9021 - protein, 9 aa, synthetic construct
LPFAEAEAF

SEQ ID NO: 9022 - protein, 9 aa, synthetic construct
LPFATPEEF

SEQ ID NO: 9023 - protein, 11 aa, synthetic construct
LPFDGPNLPTL

SEQ ID NO: 9024 - protein, 8 aa, synthetic construct
LPFEAVVL

SEQ ID NO: 9025 - protein, 9 aa, synthetic construct
LPFGKVTNL

SEQ ID NO: 9026 - protein, 9 aa, synthetic construct
LPFGPTAYF

SEQ ID NO: 9027 - protein, 9 aa, synthetic construct
LPFKETQEL

SEQ ID NO: 9028 - protein, 11 aa, synthetic construct
LPFLLENPSGY

SEQ ID NO: 9029 - protein, 9 aa, synthetic construct
LPFLNTIFY

SEQ ID NO: 9030 - protein, 9 aa, synthetic construct
LPFLRITSL

SEQ ID NO: 9031 - protein, 11 aa, synthetic construct
LPFPDETHERY

SEQ ID NO: 9032 - protein, 10 aa, synthetic construct
LPFRGSGTAI

SEQ ID NO: 9033 - protein, 11 aa, synthetic construct
LPFSLTNNDLY

SEQ ID NO: 9034 - protein, 8 aa, synthetic construct
LPGEVLEY

SEQ ID NO: 9035 - protein, 9 aa, synthetic construct
LPGKFEDMY

SEQ ID NO: 9036 - protein, 9 aa, synthetic construct
LPGPACPAF

SEQ ID NO: 9037 - protein, 9 aa, synthetic construct
LPGTPVFSY

SEQ ID NO: 9038 - protein, 8 aa, synthetic construct
LPGVAVSM

SEQ ID NO: 9039 - protein, 9 aa, synthetic construct
LPHAPGVQM

SEQ ID NO: 9040 - protein, 8 aa, synthetic construct
LPHEILEM

SEQ ID NO: 9041 - protein, 10 aa, synthetic construct
LPHEVDKSEL

SEQ ID NO: 9042 - protein, 9 aa, synthetic construct
LPHFIKDDY

SEQ ID NO: 9043 - protein, 9 aa, synthetic construct
LPHHRVIEV

SEQ ID NO: 9044 - protein, 9 aa, synthetic construct
LPHITDVSW

SEQ ID NO: 9045 - protein, 10 aa, synthetic construct
LPHLADLVSY

SEQ ID NO: 9046 - protein, 9 aa, synthetic construct
LPHLESQSL

SEQ ID NO: 9047 - protein, 9 aa, synthetic construct
LPHNRLVSL

SEQ ID NO: 9048 - protein, 9 aa, synthetic construct
LPHRTQILY

SEQ ID NO: 9049 - protein, 8 aa, synthetic construct
LPHTGYIY

SEQ ID NO: 9050 - protein, 9 aa, synthetic construct
LPHVHTVSY

SEQ ID NO: 9051 - protein, 9 aa, synthetic construct
LPIAASSSL

SEQ ID NO: 9052 - protein, 10 aa, synthetic construct
LPIDGANDLF

SEQ ID NO: 9053 - protein, 11 aa, synthetic construct
LPIDVTEGEVI

SEQ ID NO: 9054 - protein, 10 aa, synthetic construct
LPIEAPIRMM

SEQ ID NO: 9055 - protein, 9 aa, synthetic construct
LPIEGPPSF

SEQ ID NO: 9056 - protein, 9 aa, synthetic construct
LPIKESEII

SEQ ID NO: 9057 - protein, 9 aa, synthetic construct
LPKAKLKEI

SEQ ID NO: 9058 - protein, 9 aa, synthetic construct
LPKATILDL

SEQ ID NO: 9059 - protein, 9 aa, synthetic construct
LPKAVRPPL

SEQ ID NO: 9060 - protein, 9 aa, synthetic construct
LPKDLQAVL

SEQ ID NO: 9061 - protein, 9 aa, synthetic construct
LPKDQGITL

SEQ ID NO: 9062 - protein, 9 aa, synthetic construct
LPKEHAASL

SEQ ID NO: 9063 - protein, 10 aa, synthetic construct
LPKIPSNATL

SEQ ID NO: 9064 - protein, 9 aa, synthetic construct
LPKISPSSL

SEQ ID NO: 9065 - protein, 10 aa, synthetic construct
LPKKEDALLY

SEQ ID NO: 9066 - protein, 9 aa, synthetic construct
LPKKEGLSF

SEQ ID NO: 9067 - protein, 8 aa, synthetic construct
LPKKLALL

SEQ ID NO: 9068 - protein, 9 aa, synthetic construct
LPKLHIVQV

SEQ ID NO: 9069 - protein, 9 aa, synthetic construct
LPKLKELNL

SEQ ID NO: 9070 - protein, 9 aa, synthetic construct
LPKLKKLEL

SEQ ID NO: 9071 - protein, 9 aa, synthetic construct
LPKNPSVVF

SEQ ID NO: 9072 - protein, 10 aa, synthetic construct
LPKPGGAHSL

SEQ ID NO: 9073 - protein, 9 aa, synthetic construct
LPKPPFGML

SEQ ID NO: 9074 - protein, 9 aa, synthetic construct
LPKPPGRGV

SEQ ID NO: 9075 - protein, 9 aa, synthetic construct
LPKQPPLAL

SEQ ID NO: 9076 - protein, 9 aa, synthetic construct
LPKQPPLML

SEQ ID NO: 9077 - protein, 10 aa, synthetic construct
LPKSPPYTAF

SEQ ID NO: 9078 - protein, 9 aa, synthetic construct
LPKTEMTSL

SEQ ID NO: 9079 - protein, 9 aa, synthetic construct
LPKTGTVSL

SEQ ID NO: 9080 - protein, 9 aa, synthetic construct
LPLAFVATL

SEQ ID NO: 9081 - protein, 9 aa, synthetic construct
LPLDTVTFY

SEQ ID NO: 9082 - protein, 10 aa, synthetic construct
LPLEEGQAVL

SEQ ID NO: 9083 - protein, 10 aa, synthetic construct
LPLEEVVQEY

SEQ ID NO: 9084 - protein, 9 aa, synthetic construct
LPLEKVYSL

SEQ ID NO: 9085 - protein, 9 aa, synthetic construct
LPLENASIL

SEQ ID NO: 9086 - protein, 9 aa, synthetic construct
LPLHKVKSL

SEQ ID NO: 9087 - protein, 10 aa, synthetic construct
LPLKEEHKIF

SEQ ID NO: 9088 - protein, 9 aa, synthetic construct
LPLLARPAA

SEQ ID NO: 9089 - protein, 9 aa, synthetic construct
LPLLDPWYF

SEQ ID NO: 9090 - protein, 9 aa, synthetic construct
LPLLPNVSY

SEQ ID NO: 9091 - protein, 11 aa, synthetic construct
LPLNTNIRLAY

SEQ ID NO: 9092 - protein, 9 aa, synthetic construct
LPLPDPLKY

SEQ ID NO: 9093 - protein, 9 aa, synthetic construct
LPLPNFSSL

SEQ ID NO: 9094 - protein, 10 aa, synthetic construct
LPLPQNVKDY

SEQ ID NO: 9095 - protein, 8 aa, synthetic construct
LPLTHFEL

SEQ ID NO: 9096 - protein, 9 aa, synthetic construct
LPLTHFELY

SEQ ID NO: 9097 - protein, 10 aa, synthetic construct
LPMKETGLMY

SEQ ID NO: 9098 - protein, 9 aa, synthetic construct
LPMPIDVVY

SEQ ID NO: 9099 - protein, 9 aa, synthetic construct
LPNDVISSL

SEQ ID NO: 9100 - protein, 11 aa, synthetic construct
LPNFQQSVQEY

SEQ ID NO: 9101 - protein, 9 aa, synthetic construct
LPNGDIDEY

SEQ ID NO: 9102 - protein, 9 aa, synthetic construct
LPNGYVYGY

SEQ ID NO: 9103 - protein, 8 aa, synthetic construct
LPNIQAVL

SEQ ID NO: 9104 - protein, 9 aa, synthetic construct
LPNLRILDL

SEQ ID NO: 9105 - protein, 9 aa, synthetic construct
LPNLTHLNL

SEQ ID NO: 9106 - protein, 9 aa, synthetic construct
LPNTDVPIL

SEQ ID NO: 9107 - protein, 10 aa, synthetic construct
LPPEIVPATL

SEQ ID NO: 9108 - protein, 9 aa, synthetic construct
LPPEQFEKY

SEQ ID NO: 9109 - protein, 9 aa, synthetic construct
LPPGSVISY

SEQ ID NO: 9110 - protein, 9 aa, synthetic construct
LPPGVHISY

SEQ ID NO: 9111 - protein, 9 aa, synthetic construct
LPPKIVIGY

SEQ ID NO: 9112 - protein, 9 aa, synthetic construct
LPPPVHVDY

SEQ ID NO: 9113 - protein, 9 aa, synthetic construct
LPQDVILKF

SEQ ID NO: 9114 - protein, 10 aa, synthetic construct
LPQGPLGTSF

SEQ ID NO: 9115 - protein, 9 aa, synthetic construct
LPQGVRTIY

SEQ ID NO: 9116 - protein, 9 aa, synthetic construct
LPQHPDVEM

SEQ ID NO: 9117 - protein, 9 aa, synthetic construct
LPQKPHLKL

SEQ ID NO: 9118 - protein, 9 aa, synthetic construct
LPQLHSLVL

SEQ ID NO: 9119 - protein, 10 aa, synthetic construct
LPQLSDDIPF

SEQ ID NO: 9120 - protein, 9 aa, synthetic construct
LPQLTGPVL

SEQ ID NO: 9121 - protein, 9 aa, synthetic construct
LPQNQPFVF

SEQ ID NO: 9122 - protein, 10 aa, synthetic construct
LPQPPEGQTY

SEQ ID NO: 9123 - protein, 9 aa, synthetic construct
LPQPSSIVL

SEQ ID NO: 9124 - protein, 11 aa, synthetic construct
LPQPWRADVTY

SEQ ID NO: 9125 - protein, 10 aa, synthetic construct
LPRAVGTQTL

SEQ ID NO: 9126 - protein, 10 aa, synthetic construct
LPRAVNTQAL

SEQ ID NO: 9127 - protein, 9 aa, synthetic construct
LPREGEQNF

SEQ ID NO: 9128 - protein, 9 aa, synthetic construct
LPRELAEAV

SEQ ID NO: 9129 - protein, 10 aa, synthetic construct
LPRENQVVEL

SEQ ID NO: 9130 - protein, 10 aa, synthetic construct
LPRETVAGAL

SEQ ID NO: 9131 - protein, 11 aa, synthetic construct
LPRGFGSLPAL

SEQ ID NO: 9132 - protein, 10 aa, synthetic construct
LPRGGSGSVL

SEQ ID NO: 9133 - protein, 9 aa, synthetic construct
LPRGKGIRL

SEQ ID NO: 9134 - protein, 10 aa, synthetic construct
LPRGLGGIGM

SEQ ID NO: 9135 - protein, 10 aa, synthetic construct
LPRGSSPSVL

SEQ ID NO: 9136 - protein, 10 aa, synthetic construct
LPRGMQPTEF

SEQ ID NO: 9137 - protein, 9 aa, synthetic construct
LPRISPEEY

SEQ ID NO: 9138 - protein, 9 aa, synthetic construct
LPRKTRIIL

SEQ ID NO: 9139 - protein, 10 aa, synthetic construct
LPRLADLEAL

SEQ ID NO: 9140 - protein, 9 aa, synthetic construct
LPRLTPPVL

SEQ ID NO: 9141 - protein, 9 aa, synthetic construct
LPRNEADEL

SEQ ID NO: 9142 - protein, 9 aa, synthetic construct
LPRNVMFVF

SEQ ID NO: 9143 - protein, 10 aa, synthetic construct
LPRPHASIMF

SEQ ID NO: 9144 - protein, 10 aa, synthetic construct
LPRPPMLLAL

SEQ ID NO: 9145 - protein, 9 aa, synthetic construct
LPRPRWQAL

SEQ ID NO: 9146 - protein, 9 aa, synthetic construct
LPRPVPLVA

SEQ ID NO: 9147 - protein, 9 aa, synthetic construct
LPRPVPQNL

SEQ ID NO: 9148 - protein, 11 aa, synthetic construct
LPRQFNVIVAL

SEQ ID NO: 9149 - protein, 10 aa, synthetic construct
LPRQGPGQSL

SEQ ID NO: 9150 - protein, 9 aa, synthetic construct
LPRQPPMSL

SEQ ID NO: 9151 - protein, 11 aa, synthetic construct
LPRSIGNLTQL

SEQ ID NO: 9152 - protein, 10 aa, synthetic construct
LPRSINTDTL

SEQ ID NO: 9153 - protein, 9 aa, synthetic construct
LPRSVKTVL

SEQ ID NO: 9154 - protein, 9 aa, synthetic construct
LPRTAISEL

SEQ ID NO: 9155 - protein, 11 aa, synthetic construct
LPRTIFPTSTI

SEQ ID NO: 9156 - protein, 11 aa, synthetic construct
LPRVADILTQL

SEQ ID NO: 9157 - protein, 9 aa, synthetic construct
LPRMKTVLL

SEQ ID NO: 9158 - protein, 9 aa, synthetic construct
LPSAFYIKL

SEQ ID NO: 9159 - protein, 10 aa, synthetic construct
LPSASHFSQL

SEQ ID NO: 9160 - protein, 10 aa, synthetic construct
LPSATRALEL

SEQ ID NO: 9161 - protein, 9 aa, synthetic construct
LPSDIAAEA

SEQ ID NO: 9162 - protein, 10 aa, synthetic construct
LPSDLRTISL

SEQ ID NO: 9163 - protein, 9 aa, synthetic construct
LPSDTSVVL

SEQ ID NO: 9164 - protein, 9 aa, synthetic construct
LPSEGQPAL

SEQ ID NO: 9165 - protein, 9 aa, synthetic construct
LPSEHQTIL

SEQ ID NO: 9166 - protein, 9 aa, synthetic construct
LPSEIEVKY

SEQ ID NO: 9167 - protein, 9 aa, synthetic construct
LPSELERSY

SEQ ID NO: 9168 - protein, 9 aa, synthetic construct
LPSERYKEL

SEQ ID NO: 9169 - protein, 10 aa, synthetic construct
LPSESGPYGY

SEQ ID NO: 9170 - protein, 9 aa, synthetic construct
LPSETIQTY

SEQ ID NO: 9171 - protein, 9 aa, synthetic construct
LPSGAVFVI

SEQ ID NO: 9172 - protein, 9 aa, synthetic construct
LPSHVVTML

SEQ ID NO: 9173 - protein, 9 aa, synthetic construct
LPSIVNDKY

SEQ ID NO: 9174 - protein, 9 aa, synthetic construct
LPSKPSSTL

SEQ ID NO: 9175 - protein, 9 aa, synthetic construct
LPSLPTAEL

SEQ ID NO: 9176 - protein, 9 aa, synthetic construct
LPSPPAVAV

SEQ ID NO: 9177 - protein, 10 aa, synthetic construct
LPSPSPRISL

SEQ ID NO: 9178 - protein, 10 aa, synthetic construct
LPSPVTAQKY

SEQ ID NO: 9179 - protein, 9 aa, synthetic construct
LPSQEAPSF

SEQ ID NO: 9180 - protein, 9 aa, synthetic construct
LPSQKTASL

SEQ ID NO: 9181 - protein, 9 aa, synthetic construct
LPSRKLVAL

SEQ ID NO: 9182 - protein, 9 aa, synthetic construct
LPSSFVEKL

SEQ ID NO: 9183 - protein, 10 aa, synthetic construct
LPSSIRTKAL

SEQ ID NO: 9184 - protein, 9 aa, synthetic construct
LPSSPFGDY

SEQ ID NO: 9185 - protein, 9 aa, synthetic construct
LPSTPGLGM

SEQ ID NO: 9186 - protein, 9 aa, synthetic construct
LPSTRLGTL

SEQ ID NO: 9187 - protein, 9 aa, synthetic construct
LPTAVIANL

SEQ ID NO: 9188 - protein, 9 aa, synthetic construct
LPTEKEVAL

SEQ ID NO: 9189 - protein, 10 aa, synthetic construct
LPTEPPYTAY

SEQ ID NO: 9190 - protein, 9 aa, synthetic construct
LPTGEIVYF

SEQ ID NO: 9191 - protein, 9 aa, synthetic construct
LPTGIPIVY

SEQ ID NO: 9192 - protein, 9 aa, synthetic construct
LPTNPGEQF

SEQ ID NO: 9193 - protein, 9 aa, synthetic construct
LPVAKDVSY

SEQ ID NO: 9194 - protein, 9 aa, synthetic construct
LPVASSSTL

SEQ ID NO: 9195 - protein, 11 aa, synthetic construct
LPVDEDGLPSF

SEQ ID NO: 9196 - protein, 9 aa, synthetic construct
LPVDFHIKM

SEQ ID NO: 9197 - protein, 9 aa, synthetic construct
LPVDIRQYL

SEQ ID NO: 9198 - protein, 10 aa, synthetic construct
LPVECKICGL

SEQ ID NO: 9199 - protein, 10 aa, synthetic construct
LPVEQGNFPY

SEQ ID NO: 9200 - protein, 9 aa, synthetic construct
LPVETCEQY

SEQ ID NO: 9201 - protein, 10 aa, synthetic construct
LPVGGSLEDE

SEQ ID NO: 9202 - protein, 9 aa, synthetic construct
LPVGTTATL

SEQ ID NO: 9203 - protein, 10 aa, synthetic construct
LPVGTTATLY

SEQ ID NO: 9204 - protein, 9 aa, synthetic construct
LPVLERLIY

SEQ ID NO: 9205 - protein, 9 aa, synthetic construct
LPVPDPILL

SEQ ID NO: 9206 - protein, 9 aa, synthetic construct
LPVPPITAL

SEQ ID NO: 9207 - protein, 9 aa, synthetic construct
LPVPSGVAF

SEQ ID NO: 9208 - protein, 9 aa, synthetic construct
LPVPVIPSF

SEQ ID NO: 9209 - protein, 9 aa, synthetic construct
LPVPVLETY

SEQ ID NO: 9210 - protein, 11 aa, synthetic construct
LPVSEQQERAF

SEQ ID NO: 9211 - protein, 8 aa, synthetic construct
LPVSVDEY

SEQ ID NO: 9212 - protein, 9 aa, synthetic construct
LPWGTLSSL

SEQ ID NO: 9213 - protein, 8 aa, synthetic construct
LPWKAFTY

SEQ ID NO: 9214 - protein, 10 aa, synthetic construct
LPYAMKPIDY

SEQ ID NO: 9215 - protein, 10 aa, synthetic construct
LPYEDVAIPL

SEQ ID NO: 9216 - protein, 9 aa, synthetic construct
LPYFDRLDY

SEQ ID NO: 9217 - protein, 8 aa, synthetic construct
LPYFRQSL

SEQ ID NO: 9218 - protein, 9 aa, synthetic construct
LPYGREDVL

SEQ ID NO: 9219 - protein, 9 aa, synthetic construct
LPYIKQEEF

SEQ ID NO: 9220 - protein, 8 aa, synthetic construct
LPYIKQEV

SEQ ID NO: 9221 - protein, 11 aa, synthetic construct
LPYKITAEEMY

SEQ ID NO: 9222 - protein, 10 aa, synthetic construct
LPYLPSGESL

SEQ ID NO: 9223 - protein, 8 aa, synthetic construct
LPYQVVEV

SEQ ID NO: 9224 - protein, 11 aa, synthetic construct
LPYRATENDIY

SEQ ID NO: 9225 - protein, 9 aa, synthetic construct
LPYSEYFEY

SEQ ID NO: 9226 - protein, 9 aa, synthetic construct
LPYSIRVLL

SEQ ID NO: 9227 - protein, 9 aa, synthetic construct
LPYSVGRVL

SEQ ID NO: 9228 - protein, 9 aa, synthetic construct
LPYTVVIHY

SEQ ID NO: 9229 - protein, 9 aa, synthetic construct
LPYVSVTSL

SEQ ID NO: 9230 - protein, 9 aa, synthetic construct
LQEEAALPA

SEQ ID NO: 9231 - protein, 9 aa, synthetic construct
LQELDPATY

SEQ ID NO: 9232 - protein, 8 aa, synthetic construct
LQFPVGRI

SEQ ID NO: 9233 - protein, 9 aa, synthetic construct
LQIDNARLA

SEQ ID NO: 9234 - protein, 11 aa, synthetic construct
LQIDNARLAAD

SEQ ID NO: 9235 - protein, 11 aa, synthetic construct
LQKAKLMFVKS

SEQ ID NO: 9236 - protein, 8 aa, synthetic construct
LQKEMQVI

SEQ ID NO: 9237 - protein, 9 aa, synthetic construct
LQKPKKISL

SEQ ID NO: 9238 - protein, 8 aa, synthetic construct
LQLQIPRI

SEQ ID NO: 9239 - protein, 9 aa, synthetic construct
LQNKVVVTI

SEQ ID NO: 9240 - protein, 8 aa, synthetic construct
LQRLKPEI

SEQ ID NO: 9241 - protein, 8 aa, synthetic construct
LQTLQAAD

SEQ ID NO: 9242 - protein, 8 aa, synthetic construct
LQTVQLLI

SEQ ID NO: 9243 - protein, 8 aa, synthetic construct
LQVLVNAI

SEQ ID NO: 9244 - protein, 8 aa, synthetic construct
LQVQHASK

SEQ ID NO: 9245 - protein, 8 aa, synthetic construct
LQVTQPTV

SEQ ID NO: 9246 - protein, 8 aa, synthetic construct
LQWPSLTV

SEQ ID NO: 9247 - protein, 8 aa, synthetic construct
LQYEGIFI

SEQ ID NO: 9248 - protein, 8 aa, synthetic construct
LQYLLRHL

SEQ ID NO: 9249 - protein, 9 aa, synthetic construct
LRELSQIEA

SEQ ID NO: 9250 - protein, 10 aa, synthetic construct
LRFDISLKKN

SEQ ID NO: 9251 - protein, 9 aa, synthetic construct
LRFEVVPSK

SEQ ID NO: 9252 - protein, 9 aa, synthetic construct
LRFLEAVNK

SEQ ID NO: 9253 - protein, 9 aa, synthetic construct
LRFLHENQL

SEQ ID NO: 9254 - protein, 9 aa, synthetic construct
LRFPGQLNA

SEQ ID NO: 9255 - protein, 10 aa, synthetic construct
LRGLHTVLSK

SEQ ID NO: 9256 - protein, 9 aa, synthetic construct
LRHFPYAQR

SEQ ID NO: 9257 - protein, 9 aa, synthetic construct
LRHPGIVNL

SEQ ID NO: 9258 - protein, 10 aa, synthetic construct
LRIGEVGKKF

SEQ ID NO: 9259 - protein, 10 aa, synthetic construct
LRISLDKVQR

SEQ ID NO: 9260 - protein, 9 aa, synthetic construct
LRKLPFQRL

SEQ ID NO: 9261 - protein, 9 aa, synthetic construct
LRKNGFVVL

SEQ ID NO: 9262 - protein, 10 aa, synthetic construct
LRLDPKGKSL

SEQ ID NO: 9263 - protein, 9 aa, synthetic construct
LRLEAGLNR

SEQ ID NO: 9264 - protein, 9 aa, synthetic construct
LRNHMAVAF

SEQ ID NO: 9265 - protein, 9 aa, synthetic construct
LRNKVIIEY

SEQ ID NO: 9266 - protein, 9 aa, synthetic construct
LRNLWRDYK

SEQ ID NO: 9267 - protein, 9 aa, synthetic construct
LRNPLIAGK

SEQ ID NO: 9268 - protein, 9 aa, synthetic construct
LRNQSVFNF

SEQ ID NO: 9269 - protein, 9 aa, synthetic construct
LRNYLHYSL

SEQ ID NO: 9270 - protein, 9 aa, synthetic construct
LRRPAVVYI

SEQ ID NO: 9271 - protein, 9 aa, synthetic construct
LRSDIQKRL

SEQ ID NO: 9272 - protein, 9 aa, synthetic construct
LRTDFAQKL

SEQ ID NO: 9273 - protein, 9 aa, synthetic construct
LRTRFVYHL

SEQ ID NO: 9274 - protein, 9 aa, synthetic construct
LRTRVVLRI

SEQ ID NO: 9275 - protein, 10 aa, synthetic construct
LRVDQIIMAK

SEQ ID NO: 9276 - protein, 9 aa, synthetic construct
LRVTPFILK

SEQ ID NO: 9277 - protein, 10 aa, synthetic construct
LSDHLINQGY

SEQ ID NO: 9278 - protein, 9 aa, synthetic construct
LSDIVIEKY

SEQ ID NO: 9279 - protein, 9 aa, synthetic construct
LSDLGLISY

SEQ ID NO: 9280 - protein, 9 aa, synthetic construct
LSDLGRLSY

SEQ ID NO: 9281 - protein, 9 aa, synthetic construct
LSDPGSGLY

SEQ ID NO: 9282 - protein, 9 aa, synthetic construct
LSDTEVLEY

SEQ ID NO: 9283 - protein, 8 aa, synthetic construct
LSDYIRLL

SEQ ID NO: 9284 - protein, 10 aa, synthetic construct
LSEFVDPSSL

SEQ ID NO: 9285 - protein, 11 aa, synthetic construct
LSEKPTVTTVY

SEQ ID NO: 9286 - protein, 9 aa, synthetic construct
LSELAALCY

SEQ ID NO: 9287 - protein, 11 aa, synthetic construct
LSEPEEAAALY

SEQ ID NO: 9288 - protein, 8 aa, synthetic construct
LSERLLHK

SEQ ID NO: 9289 - protein, 11 aa, synthetic construct
LSFGVESSIKY

SEQ ID NO: 9290 - protein, 8 aa, synthetic construct
LSGAVEQW

SEQ ID NO: 9291 - protein, 10 aa, synthetic construct
LSGRSILAKL

SEQ ID NO: 9292 - protein, 9 aa, synthetic construct
LSLENLEKI

SEQ ID NO: 9293 - protein, 9 aa, synthetic construct
LSLQGVEVF

SEQ ID NO: 9294 - protein, 8 aa, synthetic construct
LSMEILEV

SEQ ID NO: 9295 - protein, 9 aa, synthetic construct
LSPFAITYL

SEQ ID NO: 9296 - protein, 11 aa, synthetic construct
LSPISLPRSLL

SEQ ID NO: 9297 - protein, 9 aa, synthetic construct
LSPTPATAL

SEQ ID NO: 9298 - protein, 11 aa, synthetic construct
LSYYYMGFYIH

SEQ ID NO: 9299 - protein, 9 aa, synthetic construct
LTALQGLYY

SEQ ID NO: 9300 - protein, 8 aa, synthetic construct
LTDAIDEY

SEQ ID NO: 9301 - protein, 9 aa, synthetic construct
LTDDDLLRY

SEQ ID NO: 9302 - protein, 10 aa, synthetic construct
LTDDGNKWLY

SEQ ID NO: 9303 - protein, 11 aa, synthetic construct
LTDDQIAAGLY

SEQ ID NO: 9304 - protein, 8 aa, synthetic construct
LTDITKGV

SEQ ID NO: 9305 - protein, 9 aa, synthetic construct
LTDLYSPEY

SEQ ID NO: 9306 - protein, 10 aa, synthetic construct
LTDPDGALAK

SEQ ID NO: 9307 - protein, 9 aa, synthetic construct
LTDPEAAKY

SEQ ID NO: 9308 - protein, 10 aa, synthetic construct
LTDPIQGTEY

SEQ ID NO: 9309 - protein, 9 aa, synthetic construct
LTDRELEEY

SEQ ID NO: 9310 - protein, 9 aa, synthetic construct
LTDRGVMSY

SEQ ID NO: 9311 - protein, 9 aa, synthetic construct
LTDTFTAYY

SEQ ID NO: 9312 - protein, 8 aa, synthetic construct
LTDTLDDL

SEQ ID NO: 9313 - protein, 9 aa, synthetic construct
LTDYDIRFY

SEQ ID NO: 9314 - protein, 9 aa, synthetic construct
LTEAPLNPK

SEQ ID NO: 9315 - protein, 9 aa, synthetic construct
LTEGELEEY

SEQ ID NO: 9316 - protein, 9 aa, synthetic construct
LTEKLKLLY

SEQ ID NO: 9317 - protein, 9 aa, synthetic construct
LTELPDWSY

SEQ ID NO: 9318 - protein, 9 aa, synthetic construct
LTEQYNEQY

SEQ ID NO: 9319 - protein, 9 aa, synthetic construct
LTETVVTEY

SEQ ID NO: 9320 - protein, 9 aa, synthetic construct
LTFKDCVIL

SEQ ID NO: 9321 - protein, 9 aa, synthetic construct
LTGKGLDGL

SEQ ID NO: 9322 - protein, 9 aa, synthetic construct
LTGPVMPVR

SEQ ID NO: 9323 - protein, 9 aa, synthetic construct
LTPTHYLTK

SEQ ID NO: 9324 - protein, 9 aa, synthetic construct
LTTEVHPEL

SEQ ID NO: 9325 - protein, 9 aa, synthetic construct
LTVGNNKTL

SEQ ID NO: 9326 - protein, 10 aa, synthetic construct
LTVGNNKTLL

SEQ ID NO: 9327 - protein, 11 aa, synthetic construct
LTVGNNKTLLD

SEQ ID NO: 9328 - protein, 9 aa, synthetic construct
LVDGDTLSY

SEQ ID NO: 9329 - protein, 9 aa, synthetic construct
LVFPPLTQR

SEQ ID NO: 9330 - protein, 9 aa, synthetic construct
LVIDECVEM

SEQ ID NO: 9331 - protein, 9 aa, synthetic construct
LVIPFTIKK

SEQ ID NO: 9332 - protein, 8 aa, synthetic construct
LVLGAGLL

SEQ ID NO: 9333 - protein, 9 aa, synthetic construct
LVMAPRTVL

SEQ ID NO: 9334 - protein, 9 aa, synthetic construct
LVNSLFLTD

SEQ ID NO: 9335 - protein, 9 aa, synthetic construct
LVPTRELAL

SEQ ID NO: 9336 - protein, 11 aa, synthetic construct
LVPTTHPGQPA

SEQ ID NO: 9337 - protein, 9 aa, synthetic construct
LVRDVVSSL

SEQ ID NO: 9338 - protein, 9 aa, synthetic construct
LVRPGTALE

SEQ ID NO: 9339 - protein, 11 aa, synthetic construct
LVTFNSAAHNK

SEQ ID NO: 9340 - protein, 10 aa, synthetic construct
LVVSAGPEDQ

SEQ ID NO: 9341 - protein, 10 aa, synthetic construct
LVYEQDRPLK

SEQ ID NO: 9342 - protein, 9 aa, synthetic construct
LVYNGVYQY

SEQ ID NO: 9343 - protein, 10 aa, synthetic construct
LYADVGGKQF

SEQ ID NO: 9344 - protein, 10 aa, synthetic construct
LYDINKDGYI

SEQ ID NO: 9345 - protein, 9 aa, synthetic construct
LYDLTLEYL

SEQ ID NO: 9346 - protein, 9 aa, synthetic construct
LYDLVTEKM

SEQ ID NO: 9347 - protein, 10 aa, synthetic construct
LYDLVTEKMF

SEQ ID NO: 9348 - protein, 9 aa, synthetic construct
LYDPCTVMF

SEQ ID NO: 9349 - protein, 8 aa, synthetic construct
LYDRVLKY

SEQ ID NO: 9350 - protein, 10 aa, synthetic construct
LYFHIGETEK

SEQ ID NO: 9351 - protein, 9 aa, synthetic construct
LYIVEPLKF

SEQ ID NO: 9352 - protein, 10 aa, synthetic construct
LYLKVKGNVF

SEQ ID NO: 9353 - protein, 9 aa, synthetic construct
LYNGATRKL

SEQ ID NO: 9354 - protein, 9 aa, synthetic construct
LYPEIPRKL

SEQ ID NO: 9355 - protein, 9 aa, synthetic construct
LYPGIPVIF

SEQ ID NO: 9356 - protein, 11 aa, synthetic construct
LMAEALGIPVT

SEQ ID NO: 9357 - protein, 8 aa, synthetic construct
LMAVSGLP

SEQ ID NO: 9358 - protein, 8 aa, synthetic construct
LMHSFILK

SEQ ID NO: 9359 - protein, 9 aa, synthetic construct
LMKTKQFRL

SEQ ID NO: 9360 - protein, 8 aa, synthetic construct
LMLENLQK

SEQ ID NO: 9361 - protein, 8 aa, synthetic construct
LMPVIMII

SEQ ID NO: 9362 - protein, 9 aa, synthetic construct
LMTDVLVFL

SEQ ID NO: 9363 - protein, 9 aa, synthetic construct
LMVDHVTEV

SEQ ID NO: 9364 - protein, 9 aa, synthetic construct
LNGEPGYTI

SEQ ID NO: 9365 - protein, 9 aa, synthetic construct
MADTLLLLL

SEQ ID NO: 9366 - protein, 9 aa, synthetic construct
MAHTGVIFF

SEQ ID NO: 9367 - protein, 9 aa, synthetic construct
MAIVGGMAL

SEQ ID NO: 9368 - protein, 10 aa, synthetic construct
MALQEACEAY

SEQ ID NO: 9369 - protein, 9 aa, synthetic construct
MANIPLPEY

SEQ ID NO: 9370 - protein, 9 aa, synthetic construct
MAPPSASCL

SEQ ID NO: 9371 - protein, 11 aa, synthetic construct
MARLTWASHEK

SEQ ID NO: 9372 - protein, 9 aa, synthetic construct
MAWLVDHVY

SEQ ID NO: 9373 - protein, 10 aa, synthetic construct
MAYEGQYDAY

SEQ ID NO: 9374 - protein, 9 aa, synthetic construct
MEALPLLAA

SEQ ID NO: 9375 - protein, 9 aa, synthetic construct
MELCGLGLP

SEQ ID NO: 9376 - protein, 9 aa, synthetic construct
MEYNLIQQC

SEQ ID NO: 9377 - protein, 11 aa, synthetic construct
MFVRFVSDASV

SEQ ID NO: 9378 - protein, 8 aa, synthetic construct
MGAYVLLK

SEQ ID NO: 9379 - protein, 9 aa, synthetic construct
MGCQVYEAY

SEQ ID NO: 9380 - protein, 9 aa, synthetic construct
MGFPVKVPY

SEQ ID NO: 9381 - protein, 9 aa, synthetic construct
MIEPRTLQY

SEQ ID NO: 9382 - protein, 9 aa, synthetic construct
MINELAVAM

SEQ ID NO: 9383 - protein, 8 aa, synthetic construct
MLECLGIP

SEQ ID NO: 9384 - protein, 9 aa, synthetic construct
MPAAGGVLY

SEQ ID NO: 9385 - protein, 11 aa, synthetic construct
MPAAQEGAVAF

SEQ ID NO: 9386 - protein, 10 aa, synthetic construct
MPALFSDHTF

SEQ ID NO: 9387 - protein, 10 aa, synthetic construct
MPANGETVTL

SEQ ID NO: 9388 - protein, 9 aa, synthetic construct
MPCGETAEF

SEQ ID NO: 9389 - protein, 9 aa, synthetic construct
MPCVFVTEV

SEQ ID NO: 9390 - protein, 9 aa, synthetic construct
MPDDLLTTL

SEQ ID NO: 9391 - protein, 9 aa, synthetic construct
MPDEATPHY

SEQ ID NO: 9392 - protein, 10 aa, synthetic construct
MPDPHLYHQM

SEQ ID NO: 9393 - protein, 9 aa, synthetic construct
MPEDLVEAL

SEQ ID NO: 9394 - protein, 11 aa, synthetic construct
MPEEESAKVCL

SEQ ID NO: 9395 - protein, 9 aa, synthetic construct
MPEVRGALF

SEQ ID NO: 9396 - protein, 10 aa, synthetic construct
MPFEIRLPEF

SEQ ID NO: 9397 - protein, 9 aa, synthetic construct
MPFPAHLTY

SEQ ID NO: 9398 - protein, 9 aa, synthetic construct
MPFTTVSEL

SEQ ID NO: 9399 - protein, 10 aa, synthetic construct
MPHEDCITAL

SEQ ID NO: 9400 - protein, 9 aa, synthetic construct
MPIGPDVSL

SEQ ID NO: 9401 - protein, 9 aa, synthetic construct
MPKDIQLAR

SEQ ID NO: 9402 - protein, 9 aa, synthetic construct
MPLGARILF

SEQ ID NO: 9403 - protein, 9 aa, synthetic construct
MPLPPPFAF

SEQ ID NO: 9404 - protein, 9 aa, synthetic construct
MPNENIPEL

SEQ ID NO: 9405 - protein, 9 aa, synthetic construct
MPNVKVAVF

SEQ ID NO: 9406 - protein, 9 aa, synthetic construct
MPQFSTIEY

SEQ ID NO: 9407 - protein, 11 aa, synthetic construct
MPRLPEHCIEY

SEQ ID NO: 9408 - protein, 9 aa, synthetic construct
MPSPQVVRW

SEQ ID NO: 9409 - protein, 10 aa, synthetic construct
MPSSIFQDDF

SEQ ID NO: 9410 - protein, 9 aa, synthetic construct
MPSVKVSVF

SEQ ID NO: 9411 - protein, 9 aa, synthetic construct
MPTAYNTDY

SEQ ID NO: 9412 - protein, 9 aa, synthetic construct
MPTDVLEVT

SEQ ID NO: 9413 - protein, 10 aa, synthetic construct
MPVDPNEPTY

SEQ ID NO: 9414 - protein, 9 aa, synthetic construct
MPVEKNITL

SEQ ID NO: 9415 - protein, 9 aa, synthetic construct
MPVGPAPGM

SEQ ID NO: 9416 - protein, 9 aa, synthetic construct
MPVLEQSVL

SEQ ID NO: 9417 - protein, 11 aa, synthetic construct
MPVPGHDVEAY

SEQ ID NO: 9418 - protein, 10 aa, synthetic construct
MPMGYNPYAY

SEQ ID NO: 9419 - protein, 8 aa, synthetic construct
MQIFVKTL

SEQ ID NO: 9420 - protein, 8 aa, synthetic construct
MQIRIHQI

SEQ ID NO: 9421 - protein, 9 aa, synthetic construct
MRLGSIFGL

SEQ ID NO: 9422 - protein, 10 aa, synthetic construct
MRLPSGKVGF

SEQ ID NO: 9423 - protein, 9 aa, synthetic construct
MRLSLPLLL

SEQ ID NO: 9424 - protein, 10 aa, synthetic construct
MRLSLPLLLL

SEQ ID NO: 9425 - protein, 9 aa, synthetic construct
MRMATPLLM

SEQ ID NO: 9426 - protein, 10 aa, synthetic construct
MSVDVDGTTY

SEQ ID NO: 9427 - protein, 9 aa, synthetic construct
MSVEGDYTY

SEQ ID NO: 9428 - protein, 9 aa, synthetic construct
MTEEEQIAY

SEQ ID NO: 9429 - protein, 10 aa, synthetic construct
MTIEELLTRY

SEQ ID NO: 9430 - protein, 9 aa, synthetic construct
MTKRDVPGF

SEQ ID NO: 9431 - protein, 9 aa, synthetic construct
MTYERILYI

SEQ ID NO: 9432 - protein, 10 aa, synthetic construct
MVADLVENSY

SEQ ID NO: 9433 - protein, 8 aa, synthetic construct
MVGKTFTY

SEQ ID NO: 9434 - protein, 9 aa, synthetic construct
MVTEIRLKY

SEQ ID NO: 9435 - protein, 9 aa, synthetic construct
MVVDIVQEL

SEQ ID NO: 9436 - protein, 9 aa, synthetic construct
MVVEERCVY

SEQ ID NO: 9437 - protein, 9 aa, synthetic construct
MMYQTGMKI

SEQ ID NO: 9438 - protein, 9 aa, synthetic construct
NAAFPFLAY

SEQ ID NO: 9439 - protein, 9 aa, synthetic construct
NAARDFVNY

SEQ ID NO: 9440 - protein, 9 aa, synthetic construct
NADPQAVTM

SEQ ID NO: 9441 - protein, 9 aa, synthetic construct
NAFASVILF

SEQ ID NO: 9442 - protein, 8 aa, synthetic construct
NAFATPTI

SEQ ID NO: 9443 - protein, 9 aa, synthetic construct
NAFDIAEEL

SEQ ID NO: 9444 - protein, 9 aa, synthetic construct
NAFEVAEKY

SEQ ID NO: 9445 - protein, 9 aa, synthetic construct
NAFKEITTM

SEQ ID NO: 9446 - protein, 10 aa, synthetic construct
NAFYEHAQTY

SEQ ID NO: 9447 - protein, 11 aa, synthetic construct
NAFYEHAQTYY

SEQ ID NO: 9448 - protein, 8 aa, synthetic construct
NAGEDPGL

SEQ ID NO: 9449 - protein, 9 aa, synthetic construct
NAGEDPGLA

SEQ ID NO: 9450 - protein, 10 aa, synthetic construct
NAGEDPGLAR

SEQ ID NO: 9451 - protein, 9 aa, synthetic construct
NAGRGLVRL

SEQ ID NO: 9452 - protein, 9 aa, synthetic construct
NAHEFITSF

SEQ ID NO: 9453 - protein, 9 aa, synthetic construct
NAHNQIAIY

SEQ ID NO: 9454 - protein, 9 aa, synthetic construct
NAIEAVDEF

SEQ ID NO: 9455 - protein, 9 aa, synthetic construct
NAIEDTIFY

SEQ ID NO: 9456 - protein, 11 aa, synthetic construct
NAIKLEEKGVY

SEQ ID NO: 9457 - protein, 9 aa, synthetic construct
NAIQMFHQY

SEQ ID NO: 9458 - protein, 9 aa, synthetic construct
NALGVVACY

SEQ ID NO: 9459 - protein, 9 aa, synthetic construct
NALTSPIEY

SEQ ID NO: 9460 - protein, 9 aa, synthetic construct
NALMRLNQL

SEQ ID NO: 9461 - protein, 9 aa, synthetic construct
NAMDVVVQF

SEQ ID NO: 9462 - protein, 9 aa, synthetic construct
NANHPDFPM

SEQ ID NO: 9463 - protein, 9 aa, synthetic construct
NANILLQID

SEQ ID NO: 9464 - protein, 9 aa, synthetic construct
NAPLVHATL

SEQ ID NO: 9465 - protein, 9 aa, synthetic construct
NATGVAMLF

SEQ ID NO: 9466 - protein, 11 aa, synthetic construct
NAVDLGQMSSF

SEQ ID NO: 9467 - protein, 9 aa, synthetic construct
NAVQILEQF

SEQ ID NO: 9468 - protein, 9 aa, synthetic construct
NAVVTVPAY

SEQ ID NO: 9469 - protein, 9 aa, synthetic construct
NAWTALETY

SEQ ID NO: 9470 - protein, 9 aa, synthetic construct
NAYGALDAY

SEQ ID NO: 9471 - protein, 9 aa, synthetic construct
NAYTGIVLL

SEQ ID NO: 9472 - protein, 9 aa, synthetic construct
NCPERIVTI

SEQ ID NO: 9473 - protein, 9 aa, synthetic construct
NCPFSSQDM

SEQ ID NO: 9474 - protein, 8 aa, synthetic construct
NCPTGLFM

SEQ ID NO: 9475 - protein, 9 aa, synthetic construct
NCRELPLTL

SEQ ID NO: 9476 - protein, 9 aa, synthetic construct
NEEIVPQIK

SEQ ID NO: 9477 - protein, 10 aa, synthetic construct
NEIEDTFRQF

SEQ ID NO: 9478 - protein, 9 aa, synthetic construct
NEIKDSVVA

SEQ ID NO: 9479 - protein, 9 aa, synthetic construct
NEQSLEQVF

SEQ ID NO: 9480 - protein, 9 aa, synthetic construct
NESGVRELL

SEQ ID NO: 9481 - protein, 11 aa, synthetic construct
NETTKQKLGIY

SEQ ID NO: 9482 - protein, 9 aa, synthetic construct
NEYAGFLMA

SEQ ID NO: 9483 - protein, 9 aa, synthetic construct
NFDDIKNGL

SEQ ID NO: 9484 - protein, 9 aa, synthetic construct
NFDEENAYF

SEQ ID NO: 9485 - protein, 9 aa, synthetic construct
NFDNILNSF

SEQ ID NO: 9486 - protein, 9 aa, synthetic construct
NFDRSSSTF

SEQ ID NO: 9487 - protein, 9 aa, synthetic construct
NFDTIDQQF

SEQ ID NO: 9488 - protein, 11 aa, synthetic construct
NFPNAIEHTLQ

SEQ ID NO: 9489 - protein, 11 aa, synthetic construct
NFYEERTTMIA

SEQ ID NO: 9490 - protein, 10 aa, synthetic construct
NGELEHIRPK

SEQ ID NO: 9491 - protein, 9 aa, synthetic construct
NGFGHSRLV

SEQ ID NO: 9492 - protein, 9 aa, synthetic construct
NGYKRVLAL

SEQ ID NO: 9493 - protein, 9 aa, synthetic construct
NHPNIVKLY

SEQ ID NO: 9494 - protein, 11 aa, synthetic construct
NHTIGVEFGSR

SEQ ID NO: 9495 - protein, 8 aa, synthetic construct
NIEDIYEF

SEQ ID NO: 9496 - protein, 9 aa, synthetic construct
NIFPYPVGV

SEQ ID NO: 9497 - protein, 10 aa, synthetic construct
NIFSYDYSGY

SEQ ID NO: 9498 - protein, 9 aa, synthetic construct
NIKDKVLEL

SEQ ID NO: 9499 - protein, 9 aa, synthetic construct
NIKEKLFSL

SEQ ID NO: 9500 - protein, 8 aa, synthetic construct
NIKLARQL

SEQ ID NO: 9501 - protein, 9 aa, synthetic construct
NIPAESYTF

SEQ ID NO: 9502 - protein, 10 aa, synthetic construct
NIQKESTLHL

SEQ ID NO: 9503 - protein, 11 aa, synthetic construct
NIQKESTLHLV

SEQ ID NO: 9504 - protein, 9 aa, synthetic construct
NIRQKVKEL

SEQ ID NO: 9505 - protein, 9 aa, synthetic construct
NKADVILKY

SEQ ID NO: 9506 - protein, 9 aa, synthetic construct
NKTDVVLIL

SEQ ID NO: 9507 - protein, 9 aa, synthetic construct
NKYPQAVFL

SEQ ID NO: 9508 - protein, 9 aa, synthetic construct
NLAEDIMRL

SEQ ID NO: 9509 - protein, 9 aa, synthetic construct
NLAEELEGV

SEQ ID NO: 9510 - protein, 9 aa, synthetic construct
NLAENISRV

SEQ ID NO: 9511 - protein, 9 aa, synthetic construct
NLAERIKSL

SEQ ID NO: 9512 - protein, 9 aa, synthetic construct
NLASFIEQV

SEQ ID NO: 9513 - protein, 8 aa, synthetic construct
NLCAIHAK

SEQ ID NO: 9514 - protein, 9 aa, synthetic construct
NLDFQMEQY

SEQ ID NO: 9515 - protein, 9 aa, synthetic construct
NLDIIQQEY

SEQ ID NO: 9516 - protein, 9 aa, synthetic construct
NLDSTTVAV

SEQ ID NO: 9517 - protein, 9 aa, synthetic construct
NLEAIHIIK

SEQ ID NO: 9518 - protein, 9 aa, synthetic construct
NLFDRVVTL

SEQ ID NO: 9519 - protein, 9 aa, synthetic construct
NLFEWHFTV

SEQ ID NO: 9520 - protein, 11 aa, synthetic construct
NLGGSKSISIS

SEQ ID NO: 9521 - protein, 8 aa, synthetic construct
NLIKKTVL

SEQ ID NO: 9522 - protein, 9 aa, synthetic construct
NLKEKIKEL

SEQ ID NO: 9523 - protein, 9 aa, synthetic construct
NLKFAAKEL

SEQ ID NO: 9524 - protein, 8 aa, synthetic construct
NLKLKIGL

SEQ ID NO: 9525 - protein, 8 aa, synthetic construct
NLKLKLHS

SEQ ID NO: 9526 - protein, 9 aa, synthetic construct
NLKLKLHSF

SEQ ID NO: 9527 - protein, 9 aa, synthetic construct
NLKLKLHTF

SEQ ID NO: 9528 - protein, 9 aa, synthetic construct
NLKLRIYFL

SEQ ID NO: 9529 - protein, 9 aa, synthetic construct
NLKPKFQAF

SEQ ID NO: 9530 - protein, 8 aa, synthetic construct
NLKQKVTF

SEQ ID NO: 9531 - protein, 9 aa, synthetic construct
NLKSRNVEI

SEQ ID NO: 9532 - protein, 8 aa, synthetic construct
NLKTHLRL

SEQ ID NO: 9533 - protein, 8 aa, synthetic construct
NLKVKVLF

SEQ ID NO: 9534 - protein, 9 aa, synthetic construct
NLLDLLTEV

SEQ ID NO: 9535 - protein, 9 aa, synthetic construct
NLLEGGQED

SEQ ID NO: 9536 - protein, 9 aa, synthetic construct
NLLKRFLVL

SEQ ID NO: 9537 - protein, 8 aa, synthetic construct
NLNAVSNK

SEQ ID NO: 9538 - protein, 9 aa, synthetic construct
NLPEETNEL

SEQ ID NO: 9539 - protein, 9 aa, synthetic construct
NLPKARAAL

SEQ ID NO: 9540 - protein, 9 aa, synthetic construct
NLQIDPAIQ

SEQ ID NO: 9541 - protein, 9 aa, synthetic construct
NLQIDPSIQ

SEQ ID NO: 9542 - protein, 9 aa, synthetic construct
NLRHKLLEL

SEQ ID NO: 9543 - protein, 9 aa, synthetic construct
NLMDIKIGL

SEQ ID NO: 9544 - protein, 8 aa, synthetic construct
NMYGFRKV

SEQ ID NO: 9545 - protein, 9 aa, synthetic construct
NMYGKVVTV

SEQ ID NO: 9546 - protein, 10 aa, synthetic construct
NNESTLPYDL

SEQ ID NO: 9547 - protein, 8 aa, synthetic construct
NNKVKVIL

SEQ ID NO: 9548 - protein, 8 aa, synthetic construct
NNLENLVF

SEQ ID NO: 9549 - protein, 10 aa, synthetic construct
NNPEQNRLSE

SEQ ID NO: 9550 - protein, 9 aa, synthetic construct
NPADITVLF

SEQ ID NO: 9551 - protein, 9 aa, synthetic construct
NPAEFYDNY

SEQ ID NO: 9552 - protein, 9 aa, synthetic construct
NPAENFRVL

SEQ ID NO: 9553 - protein, 9 aa, synthetic construct
NPAIRVFEY

SEQ ID NO: 9554 - protein, 9 aa, synthetic construct
NPANRSLVL

SEQ ID NO: 9555 - protein, 9 aa, synthetic construct
NPAPNPAVY

SEQ ID NO: 9556 - protein, 10 aa, synthetic construct
NPASGEKFAY

SEQ ID NO: 9557 - protein, 9 aa, synthetic construct
NPASKVIAL

SEQ ID NO: 9558 - protein, 9 aa, synthetic construct
NPASRLTAL

SEQ ID NO: 9559 - protein, 9 aa, synthetic construct
NPAVIMQTY

SEQ ID NO: 9560 - protein, 9 aa, synthetic construct
NPDAALRAL

SEQ ID NO: 9561 - protein, 9 aa, synthetic construct
NPDASYVYY

SEQ ID NO: 9562 - protein, 10 aa, synthetic construct
NPDDITNEEY

SEQ ID NO: 9563 - protein, 10 aa, synthetic construct
NPDDITQEEY

SEQ ID NO: 9564 - protein, 9 aa, synthetic construct
NPDDVFREF

SEQ ID NO: 9565 - protein, 9 aa, synthetic construct
NPDIMRQTL

SEQ ID NO: 9566 - protein, 9 aa, synthetic construct
NPDTHSWEM

SEQ ID NO: 9567 - protein, 9 aa, synthetic construct
NPEKRYNVL

SEQ ID NO: 9568 - protein, 11 aa, synthetic construct
NPENLATLERY

SEQ ID NO: 9569 - protein, 9 aa, synthetic construct
NPFQEAIVF

SEQ ID NO: 9570 - protein, 9 aa, synthetic construct
NPHDRVVAL

SEQ ID NO: 9571 - protein, 9 aa, synthetic construct
NPHGARLSL

SEQ ID NO: 9572 - protein, 9 aa, synthetic construct
NPHTDHWSF

SEQ ID NO: 9573 - protein, 9 aa, synthetic construct
NPIPFPETF

SEQ ID NO: 9574 - protein, 9 aa, synthetic construct
NPISGLLEY

SEQ ID NO: 9575 - protein, 8 aa, synthetic construct
NPKIKDIL

SEQ ID NO: 9576 - protein, 9 aa, synthetic construct
NPKNPGLWL

SEQ ID NO: 9577 - protein, 9 aa, synthetic construct
NPLGGFVHY

SEQ ID NO: 9578 - protein, 9 aa, synthetic construct
NPNEDVAIF

SEQ ID NO: 9579 - protein, 9 aa, synthetic construct
NPNLRKNVL

SEQ ID NO: 9580 - protein, 9 aa, synthetic construct
NPNSPSITY

SEQ ID NO: 9581 - protein, 9 aa, synthetic construct
NPNTGEVLY

SEQ ID NO: 9582 - protein, 9 aa, synthetic construct
NPNMRLSQL

SEQ ID NO: 9583 - protein, 9 aa, synthetic construct
NPRATFSEF

SEQ ID NO: 9584 - protein, 9 aa, synthetic construct
NPRAMQALL

SEQ ID NO: 9585 - protein, 9 aa, synthetic construct
NPRDLFGSL

SEQ ID NO: 9586 - protein, 9 aa, synthetic construct
NPRDNFLSL

SEQ ID NO: 9587 - protein, 11 aa, synthetic construct
NPRDPPSWSVL

SEQ ID NO: 9588 - protein, 10 aa, synthetic construct
NPREVGQIYL

SEQ ID NO: 9589 - protein, 9 aa, synthetic construct
NPRIPYTEL

SEQ ID NO: 9590 - protein, 9 aa, synthetic construct
NPRIRVESL

SEQ ID NO: 9591 - protein, 9 aa, synthetic construct
NPRLIASSL

SEQ ID NO: 9592 - protein, 10 aa, synthetic construct
NPRNFSDNQL

SEQ ID NO: 9593 - protein, 10 aa, synthetic construct
NPRPGQLGRL

SEQ ID NO: 9594 - protein, 10 aa, synthetic construct
NPRQINWTVL

SEQ ID NO: 9595 - protein, 11 aa, synthetic construct
NPRQPLPASGL

SEQ ID NO: 9596 - protein, 9 aa, synthetic construct
NPRVKAAAL

SEQ ID NO: 9597 - protein, 9 aa, synthetic construct
NPSENRSLL

SEQ ID NO: 9598 - protein, 9 aa, synthetic construct
NPSILPTAF

SEQ ID NO: 9599 - protein, 9 aa, synthetic construct
NPSQSILVM

SEQ ID NO: 9600 - protein, 9 aa, synthetic construct
NPSWASITY

SEQ ID NO: 9601 - protein, 9 aa, synthetic construct
NPTDAFTVF

SEQ ID NO: 9602 - protein, 10 aa, synthetic construct
NPTDAYLDAM

SEQ ID NO: 9603 - protein, 9 aa, synthetic construct
NPTTVIEVY

SEQ ID NO: 9604 - protein, 9 aa, synthetic construct
NPVDIVSTL

SEQ ID NO: 9605 - protein, 9 aa, synthetic construct
NPVDWKEQY

SEQ ID NO: 9606 - protein, 9 aa, synthetic construct
NPVEYSIVM

SEQ ID NO: 9607 - protein, 9 aa, synthetic construct
NPVGTGFSY

SEQ ID NO: 9608 - protein, 9 aa, synthetic construct
NPVQALSEF

SEQ ID NO: 9609 - protein, 9 aa, synthetic construct
NPWDNKAVY

SEQ ID NO: 9610 - protein, 9 aa, synthetic construct
NPYEFALKF

SEQ ID NO: 9611 - protein, 9 aa, synthetic construct
NPYHVVILF

SEQ ID NO: 9612 - protein, 9 aa, synthetic construct
NPYRETVCF

SEQ ID NO: 9613 - protein, 9 aa, synthetic construct
NPYSDEIEY

SEQ ID NO: 9614 - protein, 10 aa, synthetic construct
NPYSGDLTKF

SEQ ID NO: 9615 - protein, 9 aa, synthetic construct
NPYSRLMAL

SEQ ID NO: 9616 - protein, 9 aa, synthetic construct
NPYVEAEYF

SEQ ID NO: 9617 - protein, 8 aa, synthetic construct
NQEYSLLL

SEQ ID NO: 9618 - protein, 8 aa, synthetic construct
NQFASFID

SEQ ID NO: 9619 - protein, 9 aa, synthetic construct
NQFPGFKEV

SEQ ID NO: 9620 - protein, 8 aa, synthetic construct
NQFRVDYI

SEQ ID NO: 9621 - protein, 8 aa, synthetic construct
NQFVVHTV

SEQ ID NO: 9622 - protein, 9 aa, synthetic construct
NQIPFIIQY

SEQ ID NO: 9623 - protein, 8 aa, synthetic construct
NQIRLTNV

SEQ ID NO: 9624 - protein, 8 aa, synthetic construct
NQQTILQV

SEQ ID NO: 9625 - protein, 9 aa, synthetic construct
NQRVLWWSI

SEQ ID NO: 9626 - protein, 9 aa, synthetic construct
NQTIFEQTI

SEQ ID NO: 9627 - protein, 8 aa, synthetic construct
NQTPLPLI

SEQ ID NO: 9628 - protein, 8 aa, synthetic construct
NQYLRVSL

SEQ ID NO: 9629 - protein, 9 aa, synthetic construct
NRAEYYHLL

SEQ ID NO: 9630 - protein, 10 aa, synthetic construct
NRFAGFGIGL

SEQ ID NO: 9631 - protein, 9 aa, synthetic construct
NRFNYPFEL

SEQ ID NO: 9632 - protein, 9 aa, synthetic construct
NRFPWPKVL

SEQ ID NO: 9633 - protein, 9 aa, synthetic construct
NRHEIAVML

SEQ ID NO: 9634 - protein, 9 aa, synthetic construct
NRIKFVIKR

SEQ ID NO: 9635 - protein, 9 aa, synthetic construct
NRIPKEITV

SEQ ID NO: 9636 - protein, 9 aa, synthetic construct
NRLDLLITY

SEQ ID NO: 9637 - protein, 10 aa, synthetic construct
NRLFVGSIPK

SEQ ID NO: 9638 - protein, 11 aa, synthetic construct
NRPDLLDPALL

SEQ ID NO: 9639 - protein, 9 aa, synthetic construct
NRPEFITEF

SEQ ID NO: 9640 - protein, 8 aa, synthetic construct
NRPGAYEL

SEQ ID NO: 9641 - protein, 9 aa, synthetic construct
NRPKFLNAL

SEQ ID NO: 9642 - protein, 9 aa, synthetic construct
NRYDGIYKV

SEQ ID NO: 9643 - protein, 9 aa, synthetic construct
NSDELQELY

SEQ ID NO: 9644 - protein, 8 aa, synthetic construct
NSDPQFVL

SEQ ID NO: 9645 - protein, 9 aa, synthetic construct
NSELSCQLY

SEQ ID NO: 9646 - protein, 9 aa, synthetic construct
NSEPETLEY

SEQ ID NO: 9647 - protein, 8 aa, synthetic construct
NSFTVSSV

SEQ ID NO: 9648 - protein, 10 aa, synthetic construct
NSFVNDIFER

SEQ ID NO: 9649 - protein, 9 aa, synthetic construct
NSGDFYDLY

SEQ ID NO: 9650 - protein, 8 aa, synthetic construct
NSIFILMI

SEQ ID NO: 9651 - protein, 9 aa, synthetic construct
NSLFLTDLY

SEQ ID NO: 9652 - protein, 9 aa, synthetic construct
NSLHIVNTY

SEQ ID NO: 9653 - protein, 9 aa, synthetic construct
NSPEKACSL

SEQ ID NO: 9654 - protein, 9 aa, synthetic construct
NSPFQVTAL

SEQ ID NO: 9655 - protein, 9 aa, synthetic construct
NSPLPGSEL

SEQ ID NO: 9656 - protein, 9 aa, synthetic construct
NSPSFCTSL

SEQ ID NO: 9657 - protein, 8 aa, synthetic construct
NSRIKLGL

SEQ ID NO: 9658 - protein, 9 aa, synthetic construct
NTCEHIYEF

SEQ ID NO: 9659 - protein, 8 aa, synthetic construct
NTDEMVEL

SEQ ID NO: 9660 - protein, 9 aa, synthetic construct
NTDEPPMVF

SEQ ID NO: 9661 - protein, 9 aa, synthetic construct
NTDFYQTSY

SEQ ID NO: 9662 - protein, 10 aa, synthetic construct
NTDHQTQLLY

SEQ ID NO: 9663 - protein, 9 aa, synthetic construct
NTDIAENLY

SEQ ID NO: 9664 - protein, 9 aa, synthetic construct
NTDNLLTEY

SEQ ID NO: 9665 - protein, 10 aa, synthetic construct
NTDPWAGYRY

SEQ ID NO: 9666 - protein, 8 aa, synthetic construct
NTDQGVYL

SEQ ID NO: 9667 - protein, 10 aa, synthetic construct
NTDSLDWALY

SEQ ID NO: 9668 - protein, 8 aa, synthetic construct
NTDSPLRY

SEQ ID NO: 9669 - protein, 9 aa, synthetic construct
NTPEDVQAL

SEQ ID NO: 9670 - protein, 9 aa, synthetic construct
NTRMTLDDF

SEQ ID NO: 9671 - protein, 8 aa, synthetic construct
NTYIDSYK

SEQ ID NO: 9672 - protein, 9 aa, synthetic construct
NVADLHEKY

SEQ ID NO: 9673 - protein, 9 aa, synthetic construct
NVDAILEEY

SEQ ID NO: 9674 - protein, 9 aa, synthetic construct
NVDDPTGNF

SEQ ID NO: 9675 - protein, 8 aa, synthetic construct
NVDSFVEL

SEQ ID NO: 9676 - protein, 10 aa, synthetic construct
NVDTESALLY

SEQ ID NO: 9677 - protein, 9 aa, synthetic construct
NVEIDPEIQ

SEQ ID NO: 9678 - protein, 9 aa, synthetic construct
NVFGVCHIF

SEQ ID NO: 9679 - protein, 9 aa, synthetic construct
NVHDIMVSF

SEQ ID NO: 9680 - protein, 9 aa, synthetic construct
NVIDKLAQF

SEQ ID NO: 9681 - protein, 11 aa, synthetic construct
NVIEGPVFRPG

SEQ ID NO: 9682 - protein, 9 aa, synthetic construct
NVKEKIYAV

SEQ ID NO: 9683 - protein, 9 aa, synthetic construct
NVKLRANAL

SEQ ID NO: 9684 - protein, 9 aa, synthetic construct
NVKVDPEIQ

SEQ ID NO: 9685 - protein, 9 aa, synthetic construct
NVPEAASTL

SEQ ID NO: 9686 - protein, 11 aa, synthetic construct
NVPVIGGHAGK

SEQ ID NO: 9687 - protein, 9 aa, synthetic construct
NVRIATTAL

SEQ ID NO: 9688 - protein, 9 aa, synthetic construct
NVRPPNTAL

SEQ ID NO: 9689 - protein, 9 aa, synthetic construct
NVRPVPLEL

SEQ ID NO: 9690 - protein, 11 aa, synthetic construct
NVSRAKAVRAL

SEQ ID NO: 9691 - protein, 9 aa, synthetic construct
NVVAVIVAF

SEQ ID NO: 9692 - protein, 9 aa, synthetic construct
NVVEALIAL

SEQ ID NO: 9693 - protein, 10 aa, synthetic construct
NVVKLLGEQY

SEQ ID NO: 9694 - protein, 9 aa, synthetic construct
NVYCGVHRY

SEQ ID NO: 9695 - protein, 9 aa, synthetic construct
NVYDFKTTY

SEQ ID NO: 9696 - protein, 9 aa, synthetic construct
NYAGLQRSV

SEQ ID NO: 9697 - protein, 9 aa, synthetic construct
NYDEALRLL

SEQ ID NO: 9698 - protein, 9 aa, synthetic construct
NYDEMKNLL

SEQ ID NO: 9699 - protein, 9 aa, synthetic construct
NYGVLHVTF

SEQ ID NO: 9700 - protein, 9 aa, synthetic construct
NYIDKVRFL

SEQ ID NO: 9701 - protein, 10 aa, synthetic construct
NYIDKVRFLE

SEQ ID NO: 9702 - protein, 9 aa, synthetic construct
NYIGLINRI

SEQ ID NO: 9703 - protein, 9 aa, synthetic construct
NYIPRFWTF

SEQ ID NO: 9704 - protein, 10 aa, synthetic construct
NYISDPTILW

SEQ ID NO: 9705 - protein, 11 aa, synthetic construct
NYLDPRITVAW

SEQ ID NO: 9706 - protein, 8 aa, synthetic construct
NYLGHTAK

SEQ ID NO: 9707 - protein, 9 aa, synthetic construct
NYLHLDYNF

SEQ ID NO: 9708 - protein, 9 aa, synthetic construct
NYLPFIMEL

SEQ ID NO: 9709 - protein, 9 aa, synthetic construct
NYLSHHLTI

SEQ ID NO: 9710 - protein, 9 aa, synthetic construct
NYPGLSISL

SEQ ID NO: 9711 - protein, 9 aa, synthetic construct
NYQNVVHKL

SEQ ID NO: 9712 - protein, 9 aa, synthetic construct
NYRNVIHTY

SEQ ID NO: 9713 - protein, 8 aa, synthetic construct
NYYVRAVL

SEQ ID NO: 9714 - protein, 8 aa, synthetic construct
NMFEFKHI

SEQ ID NO: 9715 - protein, 9 aa, synthetic construct
NMQDMVEDY

SEQ ID NO: 9716 - protein, 9 aa, synthetic construct
NMVDIIHSV

SEQ ID NO: 9717 - protein, 8 aa, synthetic construct
PAEGRVAL

SEQ ID NO: 9718 - protein, 8 aa, synthetic construct
PAEITLTW

SEQ ID NO: 9719 - protein, 9 aa, synthetic construct
PAELAINPS

SEQ ID NO: 9720 - protein, 8 aa, synthetic construct
PAENGETK

SEQ ID NO: 9721 - protein, 8 aa, synthetic construct
PAFKRKTL

SEQ ID NO: 9722 - protein, 8 aa, synthetic construct
PAGRKVGL

SEQ ID NO: 9723 - protein, 8 aa, synthetic construct
PAGSLDTL

SEQ ID NO: 9724 - protein, 8 aa, synthetic construct
PAKLHNSL

SEQ ID NO: 9725 - protein, 8 aa, synthetic construct
PAKPPVSF

SEQ ID NO: 9726 - protein, 8 aa, synthetic construct
PALKRLDL

SEQ ID NO: 9727 - protein, 8 aa, synthetic construct
PAPIHNQF

SEQ ID NO: 9728 - protein, 9 aa, synthetic construct
PASPVVHIR

SEQ ID NO: 9729 - protein, 10 aa, synthetic construct
PAVHAGILAR

SEQ ID NO: 9730 - protein, 8 aa, synthetic construct
PAWDPMGA

SEQ ID NO: 9731 - protein, 9 aa, synthetic construct
PAWDPMGAL

SEQ ID NO: 9732 - protein, 8 aa, synthetic construct
PDAKIRIF

SEQ ID NO: 9733 - protein, 9 aa, synthetic construct
PDDHAGPIR

SEQ ID NO: 9734 - protein, 8 aa, synthetic construct
PDETHERY

SEQ ID NO: 9735 - protein, 11 aa, synthetic construct
PDLDSEPWIEV

SEQ ID NO: 9736 - protein, 9 aa, synthetic construct
PDPHLYHQM

SEQ ID NO: 9737 - protein, 9 aa, synthetic construct
PDPKLLEKV

SEQ ID NO: 9738 - protein, 10 aa, synthetic construct
PDPKTFKQHF

SEQ ID NO: 9739 - protein, 8 aa, synthetic construct
PDSQRLKL

SEQ ID NO: 9740 - protein, 8 aa, synthetic construct
PDTGISSK

SEQ ID NO: 9741 - protein, 10 aa, synthetic construct
PDTGRILSKL

SEQ ID NO: 9742 - protein, 11 aa, synthetic construct
PEEEDHVLVLR

SEQ ID NO: 9743 - protein, 11 aa, synthetic construct
PEEVSSMVLTK

SEQ ID NO: 9744 - protein, 9 aa, synthetic construct
PEFPLSPPK

SEQ ID NO: 9745 - protein, 8 aa, synthetic construct
PEKRYNVL

SEQ ID NO: 9746 - protein, 8 aa, synthetic construct
PELHRPVV

SEQ ID NO: 9747 - protein, 8 aa, synthetic construct
PENVDITL

SEQ ID NO: 9748 - protein, 8 aa, synthetic construct
PFENKREF

SEQ ID NO: 9749 - protein, 8 aa, synthetic construct
PFHLIVSY

SEQ ID NO: 9750 - protein, 9 aa, synthetic construct
PFHQLRISY

SEQ ID NO: 9751 - protein, 8 aa, synthetic construct
PFIYGHKY

SEQ ID NO: 9752 - protein, 9 aa, synthetic construct
PFKPPKVAF

SEQ ID NO: 9753 - protein, 9 aa, synthetic construct
PFKPPKVTF

SEQ ID NO: 9754 - protein, 10 aa, synthetic construct
PFMVVNDAGR

SEQ ID NO: 9755 - protein, 10 aa, synthetic construct
PFPDETHERY

SEQ ID NO: 9756 - protein, 9 aa, synthetic construct
PFVDHVFTF

SEQ ID NO: 9757 - protein, 10 aa, synthetic construct
PGDVFYLHSR

SEQ ID NO: 9758 - protein, 9 aa, synthetic construct
PGFAPLTSR

SEQ ID NO: 9759 - protein, 9 aa, synthetic construct
PGIFITKII

SEQ ID NO: 9760 - protein, 9 aa, synthetic construct
PGKDLTKTL

SEQ ID NO: 9761 - protein, 11 aa, synthetic construct
PGLARQAPKPR

SEQ ID NO: 9762 - protein, 10 aa, synthetic construct
PGLSIGDTAK

SEQ ID NO: 9763 - protein, 11 aa, synthetic construct
PGSEETQTLVR

SEQ ID NO: 9764 - protein, 10 aa, synthetic construct
PGSFDVVHVK

SEQ ID NO: 9765 - protein, 9 aa, synthetic construct
PGYGHAVLR

SEQ ID NO: 9766 - protein, 9 aa, synthetic construct
PHATIAEIK

SEQ ID NO: 9767 - protein, 8 aa, synthetic construct
PHFIKDDY

SEQ ID NO: 9768 - protein, 8 aa, synthetic construct
PHFNPLSR

SEQ ID NO: 9769 - protein, 8 aa, synthetic construct
PHFNSLPR

SEQ ID NO: 9770 - protein, 9 aa, synthetic construct
PHIHAFEQK

SEQ ID NO: 9771 - protein, 8 aa, synthetic construct
PHKGLVLL

SEQ ID NO: 9772 - protein, 8 aa, synthetic construct
PHLLANSK

SEQ ID NO: 9773 - protein, 8 aa, synthetic construct
PHLPGKTF

SEQ ID NO: 9774 - protein, 8 aa, synthetic construct
PHLVGPHL

SEQ ID NO: 9775 - protein, 10 aa, synthetic construct
PHNHVLYSNR

SEQ ID NO: 9776 - protein, 8 aa, synthetic construct
PHNRLVSL

SEQ ID NO: 9777 - protein, 8 aa, synthetic construct
PHQPIENL

SEQ ID NO: 9778 - protein, 8 aa, synthetic construct
PHQTFVRL

SEQ ID NO: 9779 - protein, 9 aa, synthetic construct
PIDTVDFER

SEQ ID NO: 9780 - protein, 9 aa, synthetic construct
PIGRGQREL

SEQ ID NO: 9781 - protein, 9 aa, synthetic construct
PIISTHLAK

SEQ ID NO: 9782 - protein, 10 aa, synthetic construct
PILGVTEAFK

SEQ ID NO: 9783 - protein, 10 aa, synthetic construct
PISDHEATLR

SEQ ID NO: 9784 - protein, 8 aa, synthetic construct
PITLFVEK

SEQ ID NO: 9785 - protein, 8 aa, synthetic construct
PITLYLEK

SEQ ID NO: 9786 - protein, 11 aa, synthetic construct
PKCPKCNKEVY

SEQ ID NO: 9787 - protein, 8 aa, synthetic construct
PKFKYALL

SEQ ID NO: 9788 - protein, 8 aa, synthetic construct
PKLKKLEL

SEQ ID NO: 9789 - protein, 8 aa, synthetic construct
PKLKVCAL

SEQ ID NO: 9790 - protein, 10 aa, synthetic construct
PKNNLEALED

SEQ ID NO: 9791 - protein, 8 aa, synthetic construct
PKRPLLGL

SEQ ID NO: 9792 - protein, 8 aa, synthetic construct
PKSKFLAL

SEQ ID NO: 9793 - protein, 8 aa, synthetic construct
PLARVKAL

SEQ ID NO: 9794 - protein, 9 aa, synthetic construct
PLEASNPAL

SEQ ID NO: 9795 - protein, 8 aa, synthetic construct
PLGLRRIL

SEQ ID NO: 9796 - protein, 8 aa, synthetic construct
PLHKVKSL

SEQ ID NO: 9797 - protein, 9 aa, synthetic construct
PLLDLHIEL

SEQ ID NO: 9798 - protein, 9 aa, synthetic construct
PLLLKDELL

SEQ ID NO: 9799 - protein, 9 aa, synthetic construct
PLSHEVISR

SEQ ID NO: 9800 - protein, 8 aa, synthetic construct
PLSKIKTL

SEQ ID NO: 9801 - protein, 10 aa, synthetic construct
PLSRSAPTTL

SEQ ID NO: 9802 - protein, 8 aa, synthetic construct
PLTKSISL

SEQ ID NO: 9803 - protein, 11 aa, synthetic construct
PMFIVNTNVPR

SEQ ID NO: 9804 - protein, 10 aa, synthetic construct
PNAGRGLVRL

SEQ ID NO: 9805 - protein, 8 aa, synthetic construct
PNFYDETY

SEQ ID NO: 9806 - protein, 10 aa, synthetic construct
PNIQAVLLPK

SEQ ID NO: 9807 - protein, 8 aa, synthetic construct
PNQKRLTL

SEQ ID NO: 9808 - protein, 9 aa, synthetic construct
PNQKRLTLL

SEQ ID NO: 9809 - protein, 8 aa, synthetic construct
PNWHRDLV

SEQ ID NO: 9810 - protein, 8 aa, synthetic construct
PNYRLKSL

SEQ ID NO: 9811 - protein, 9 aa, synthetic construct
PPAPETLMR

SEQ ID NO: 9812 - protein, 8 aa, synthetic construct
PPGVHISY

SEQ ID NO: 9813 - protein, 9 aa, synthetic construct
PPLPDGQPD

SEQ ID NO: 9814 - protein, 9 aa, synthetic construct
PPLPKRPAL

SEQ ID NO: 9815 - protein, 9 aa, synthetic construct
PPVQILYNR

SEQ ID NO: 9816 - protein, 9 aa, synthetic construct
PQKQREITL

SEQ ID NO: 9817 - protein, 8 aa, synthetic construct
PQLPAPPK

SEQ ID NO: 9818 - protein, 8 aa, synthetic construct
PRGKGIRL

SEQ ID NO: 9819 - protein, 9 aa, synthetic construct
PRIALHTAL

SEQ ID NO: 9820 - protein, 8 aa, synthetic construct
PRLERILL

SEQ ID NO: 9821 - protein, 8 aa, synthetic construct
PRLPARLI

SEQ ID NO: 9822 - protein, 10 aa, synthetic construct
PRPDRLVNRL

SEQ ID NO: 9823 - protein, 8 aa, synthetic construct
PRPVLRAL

SEQ ID NO: 9824 - protein, 8 aa, synthetic construct
PRQPPMSL

SEQ ID NO: 9825 - protein, 8 aa, synthetic construct
PRVPTHTL

SEQ ID NO: 9826 - protein, 8 aa, synthetic construct
PSEIEVKY

SEQ ID NO: 9827 - protein, 8 aa, synthetic construct
PSERYKEL

SEQ ID NO: 9828 - protein, 8 aa, synthetic construct
PSFELLHK

SEQ ID NO: 9829 - protein, 9 aa, synthetic construct
PSGAHPSVR

SEQ ID NO: 9830 - protein, 8 aa, synthetic construct
PSGFRKFL

SEQ ID NO: 9831 - protein, 8 aa, synthetic construct
PSHTKIKY

SEQ ID NO: 9832 - protein, 9 aa, synthetic construct
PSIDRLRVL

SEQ ID NO: 9833 - protein, 10 aa, synthetic construct
PSIHGHDYVK

SEQ ID NO: 9834 - protein, 9 aa, synthetic construct
PSKIMLVEP

SEQ ID NO: 9835 - protein, 8 aa, synthetic construct
PSRKLVAL

SEQ ID NO: 9836 - protein, 9 aa, synthetic construct
PTAGPYYSP

SEQ ID NO: 9837 - protein, 9 aa, synthetic construct
PTALPSFST

SEQ ID NO: 9838 - protein, 9 aa, synthetic construct
PTDAYQLNY

SEQ ID NO: 9839 - protein, 9 aa, synthetic construct
PTDEITVYY

SEQ ID NO: 9840 - protein, 9 aa, synthetic construct
PTFLHLHGK

SEQ ID NO: 9841 - protein, 9 aa, synthetic construct
PTPRIKAEL

SEQ ID NO: 9842 - protein, 10 aa, synthetic construct
PTTTPGLDPA

SEQ ID NO: 9843 - protein, 8 aa, synthetic construct
PVDFHIKM

SEQ ID NO: 9844 - protein, 8 aa, synthetic construct
PVEHPDKF

SEQ ID NO: 9845 - protein, 10 aa, synthetic construct
PVEPEVAIHR

SEQ ID NO: 9846 - protein, 9 aa, synthetic construct
PVGGSLEDE

SEQ ID NO: 9847 - protein, 11 aa, synthetic construct
PVHLTAFLGYK

SEQ ID NO: 9848 - protein, 9 aa, synthetic construct
PVIGGHAGK

SEQ ID NO: 9849 - protein, 8 aa, synthetic construct
PVLCALAK

SEQ ID NO: 9850 - protein, 11 aa, synthetic construct
PVLKNPDDPDT

SEQ ID NO: 9851 - protein, 8 aa, synthetic construct
PVNESFGF

SEQ ID NO: 9852 - protein, 8 aa, synthetic construct
PWDNKAVY

SEQ ID NO: 9853 - protein, 10 aa, synthetic construct
PWEVPKKLKY

SEQ ID NO: 9854 - protein, 8 aa, synthetic construct
PWNAFPGK

SEQ ID NO: 9855 - protein, 8 aa, synthetic construct
PWPKVLKI

SEQ ID NO: 9856 - protein, 9 aa, synthetic construct
PYLFHVVTF

SEQ ID NO: 9857 - protein, 8 aa, synthetic construct
PYPRPIHL

SEQ ID NO: 9858 - protein, 9 aa, synthetic construct
PYYSKFILI

SEQ ID NO: 9859 - protein, 11 aa, synthetic construct
PYMDSPQSIGF

SEQ ID NO: 9860 - protein, 8 aa, synthetic construct
PMIKKIAF

SEQ ID NO: 9861 - protein, 10 aa, synthetic construct
QAADYFGDAF

SEQ ID NO: 9862 - protein, 9 aa, synthetic construct
QAAMPQVSY

SEQ ID NO: 9863 - protein, 9 aa, synthetic construct
QAAQLSTTF

SEQ ID NO: 9864 - protein, 9 aa, synthetic construct
QADPTKLEL

SEQ ID NO: 9865 - protein, 9 aa, synthetic construct
QAESAAAVW

SEQ ID NO: 9866 - protein, 9 aa, synthetic construct
QAFEQALEF

SEQ ID NO: 9867 - protein, 8 aa, synthetic construct
QAFKKLAL

SEQ ID NO: 9868 - protein, 9 aa, synthetic construct
QAFVDCHEF

SEQ ID NO: 9869 - protein, 9 aa, synthetic construct
QAGAEILTY

SEQ ID NO: 9870 - protein, 9 aa, synthetic construct
QAGAVFQSF

SEQ ID NO: 9871 - protein, 9 aa, synthetic construct
QAGPLPLSY

SEQ ID NO: 9872 - protein, 8 aa, synthetic construct
QAHFRSYL

SEQ ID NO: 9873 - protein, 9 aa, synthetic construct
QAIPVTSEL

SEQ ID NO: 9874 - protein, 9 aa, synthetic construct
QAIQWILHY

SEQ ID NO: 9875 - protein, 9 aa, synthetic construct
QAKDVIEEY

SEQ ID NO: 9876 - protein, 9 aa, synthetic construct
QALALIELY

SEQ ID NO: 9877 - protein, 9 aa, synthetic construct
QALLDLHAL

SEQ ID NO: 9878 - protein, 9 aa, synthetic construct
QANIRLTSL

SEQ ID NO: 9879 - protein, 8 aa, synthetic construct
QAPTGLGL

SEQ ID NO: 9880 - protein, 9 aa, synthetic construct
QAVAIFTVY

SEQ ID NO: 9881 - protein, 9 aa, synthetic construct
QAVDAVEEF

SEQ ID NO: 9882 - protein, 9 aa, synthetic construct
QAVIPTIEY

SEQ ID NO: 9883 - protein, 9 aa, synthetic construct
QAVPLADSF

SEQ ID NO: 9884 - protein, 11 aa, synthetic construct
QAWQEASDNCF

SEQ ID NO: 9885 - protein, 9 aa, synthetic construct
QAYPTTVVF

SEQ ID NO: 9886 - protein, 9 aa, synthetic construct
QDHRGAFLI

SEQ ID NO: 9887 - protein, 10 aa, synthetic construct
QDLLYAVAVK

SEQ ID NO: 9888 - protein, 9 aa, synthetic construct
QEDLRTFSW

SEQ ID NO: 9889 - protein, 9 aa, synthetic construct
QEFVRALAA

SEQ ID NO: 9890 - protein, 9 aa, synthetic construct
QEINTLLEA

SEQ ID NO: 9891 - protein, 9 aa, synthetic construct
QEIPVVSAP

SEQ ID NO: 9892 - protein, 9 aa, synthetic construct
QEISHLIEP

SEQ ID NO: 9893 - protein, 9 aa, synthetic construct
QELSRFIAA

SEQ ID NO: 9894 - protein, 10 aa, synthetic construct
QETLSPQFTQ

SEQ ID NO: 9895 - protein, 9 aa, synthetic construct
QEVAPPLEA

SEQ ID NO: 9896 - protein, 9 aa, synthetic construct
QEYFGSLAA

SEQ ID NO: 9897 - protein, 10 aa, synthetic construct
QEYGSIFTGA

SEQ ID NO: 9898 - protein, 9 aa, synthetic construct
QEYKFSVDV

SEQ ID NO: 9899 - protein, 9 aa, synthetic construct
QEYNAYLAA

SEQ ID NO: 9900 - protein, 9 aa, synthetic construct
QEYNQFCVI

SEQ ID NO: 9901 - protein, 9 aa, synthetic construct
QEYPTLKVP

SEQ ID NO: 9902 - protein, 10 aa, synthetic construct
QEYSKFLQQA

SEQ ID NO: 9903 - protein, 8 aa, synthetic construct
QFDVATHL

SEQ ID NO: 9904 - protein, 9 aa, synthetic construct
QFDYSGTQV

SEQ ID NO: 9905 - protein, 9 aa, synthetic construct
QFIDKPVCF

SEQ ID NO: 9906 - protein, 8 aa, synthetic construct
QFIIKHEL

SEQ ID NO: 9907 - protein, 9 aa, synthetic construct
QFINFPIYV

SEQ ID NO: 9908 - protein, 9 aa, synthetic construct
QGAMVEKKI

SEQ ID NO: 9909 - protein, 9 aa, synthetic construct
QGTARLASL

SEQ ID NO: 9910 - protein, 10 aa, synthetic construct
QGVMVGMGQK

SEQ ID NO: 9911 - protein, 9 aa, synthetic construct
QGYGRVNVV

SEQ ID NO: 9912 - protein, 8 aa, synthetic construct
QGYLRSVF

SEQ ID NO: 9913 - protein, 9 aa, synthetic construct
QIAVGFLEL

SEQ ID NO: 9914 - protein, 8 aa, synthetic construct
QIDNARLA

SEQ ID NO: 9915 - protein, 9 aa, synthetic construct
QIFKPIISK

SEQ ID NO: 9916 - protein, 11 aa, synthetic construct
QIFRPDNFVFG

SEQ ID NO: 9917 - protein, 10 aa, synthetic construct
QIFVKTLTGK

SEQ ID NO: 9918 - protein, 9 aa, synthetic construct
QIKDAIGRY

SEQ ID NO: 9919 - protein, 9 aa, synthetic construct
QILEGVYYL

SEQ ID NO: 9920 - protein, 8 aa, synthetic construct
QILKIRLL

SEQ ID NO: 9921 - protein, 10 aa, synthetic construct
QIPQLPAPPK

SEQ ID NO: 9922 - protein, 9 aa, synthetic construct
QIVDVFMEY

SEQ ID NO: 9923 - protein, 10 aa, synthetic construct
QKAEGAGDAK

SEQ ID NO: 9924 - protein, 8 aa, synthetic construct
QKDKTSVI

SEQ ID NO: 9925 - protein, 8 aa, synthetic construct
QKRLKTVL

SEQ ID NO: 9926 - protein, 9 aa, synthetic construct
QKYPFPILI

SEQ ID NO: 9927 - protein, 10 aa, synthetic construct
QLAASSQDMI

SEQ ID NO: 9928 - protein, 9 aa, synthetic construct
QLAQFVHEV

SEQ ID NO: 9929 - protein, 9 aa, synthetic construct
QLDDLKVEL

SEQ ID NO: 9930 - protein, 10 aa, synthetic construct
QLDSAVKNLY

SEQ ID NO: 9931 - protein, 10 aa, synthetic construct
QLDTRVSEFY

SEQ ID NO: 9932 - protein, 11 aa, synthetic construct
QLEDGRTLSDY

SEQ ID NO: 9933 - protein, 9 aa, synthetic construct
QLFQRPNAL

SEQ ID NO: 9934 - protein, 9 aa, synthetic construct
QLFVRAQEL

SEQ ID NO: 9935 - protein, 9 aa, synthetic construct
QLIDKVWQL

SEQ ID NO: 9936 - protein, 9 aa, synthetic construct
QLKAQYKSL

SEQ ID NO: 9937 - protein, 9 aa, synthetic construct
QLKERIAGL

SEQ ID NO: 9938 - protein, 8 aa, synthetic construct
QLKFARSL

SEQ ID NO: 9939 - protein, 9 aa, synthetic construct
QLLDQVEQI

SEQ ID NO: 9940 - protein, 9 aa, synthetic construct
QLLTGSPEL

SEQ ID NO: 9941 - protein, 9 aa, synthetic construct
QLPNFAFSV

SEQ ID NO: 9942 - protein, 9 aa, synthetic construct
QLRLPGQQL

SEQ ID NO: 9943 - protein, 9 aa, synthetic construct
QLSLRTVSL

SEQ ID NO: 9944 - protein, 8 aa, synthetic construct
QLVALKVI

SEQ ID NO: 9945 - protein, 9 aa, synthetic construct
QLVDIIEKV

SEQ ID NO: 9946 - protein, 9 aa, synthetic construct
QLVDTTVEL

SEQ ID NO: 9947 - protein, 9 aa, synthetic construct
QLYSVDVTL

SEQ ID NO: 9948 - protein, 9 aa, synthetic construct
QLYWSHPRK

SEQ ID NO: 9949 - protein, 9 aa, synthetic construct
QMFQGIILF

SEQ ID NO: 9950 - protein, 8 aa, synthetic construct
QNLERQVL

SEQ ID NO: 9951 - protein, 9 aa, synthetic construct
QNMIKGVTL

SEQ ID NO: 9952 - protein, 9 aa, synthetic construct
QPAEMAAEL

SEQ ID NO: 9953 - protein, 10 aa, synthetic construct
QPAGILEHQY

SEQ ID NO: 9954 - protein, 10 aa, synthetic construct
QPAIIDGELY

SEQ ID NO: 9955 - protein, 9 aa, synthetic construct
QPAPELAVF

SEQ ID NO: 9956 - protein, 11 aa, synthetic construct
QPASATLYDYY

SEQ ID NO: 9957 - protein, 9 aa, synthetic construct
QPASFAVSL

SEQ ID NO: 9958 - protein, 10 aa, synthetic construct
QPDEKSIITY

SEQ ID NO: 9959 - protein, 10 aa, synthetic construct
QPDQTRIVAL

SEQ ID NO: 9960 - protein, 9 aa, synthetic construct
QPEPGGVPL

SEQ ID NO: 9961 - protein, 9 aa, synthetic construct
QPFDVGPRY

SEQ ID NO: 9962 - protein, 10 aa, synthetic construct
QPFFQKRSEL

SEQ ID NO: 9963 - protein, 9 aa, synthetic construct
QPFQVAEVF

SEQ ID NO: 9964 - protein, 9 aa, synthetic construct
QPGSFEYEY

SEQ ID NO: 9965 - protein, 9 aa, synthetic construct
QPGVLIQVY

SEQ ID NO: 9966 - protein, 9 aa, synthetic construct
QPIGHPDAL

SEQ ID NO: 9967 - protein, 9 aa, synthetic construct
QPILRFLQL

SEQ ID NO: 9968 - protein, 9 aa, synthetic construct
QPINLIFRY

SEQ ID NO: 9969 - protein, 9 aa, synthetic construct
QPIVWITPY

SEQ ID NO: 9970 - protein, 9 aa, synthetic construct
QPLALNVAY

SEQ ID NO: 9971 - protein, 10 aa, synthetic construct
QPLAPSGLTL

SEQ ID NO: 9972 - protein, 9 aa, synthetic construct
QPLEEIITY

SEQ ID NO: 9973 - protein, 10 aa, synthetic construct
QPLEEIITYY

SEQ ID NO: 9974 - protein, 9 aa, synthetic construct
QPLKKLVSF

SEQ ID NO: 9975 - protein, 8 aa, synthetic construct
QPLLREVL

SEQ ID NO: 9976 - protein, 9 aa, synthetic construct
QPMEVQEGY

SEQ ID NO: 9977 - protein, 9 aa, synthetic construct
QPMSFVLEF

SEQ ID NO: 9978 - protein, 9 aa, synthetic construct
QPNARLIVM

SEQ ID NO: 9979 - protein, 9 aa, synthetic construct
QPNFPSPEY

SEQ ID NO: 9980 - protein, 9 aa, synthetic construct
QPQFQRQGL

SEQ ID NO: 9981 - protein, 11 aa, synthetic construct
QPQQPYTGQIY

SEQ ID NO: 9982 - protein, 10 aa, synthetic construct
QPRWAQGATM

SEQ ID NO: 9983 - protein, 9 aa, synthetic construct
QPRYPVNSV

SEQ ID NO: 9984 - protein, 10 aa, synthetic construct
QPSASLGVGY

SEQ ID NO: 9985 - protein, 11 aa, synthetic construct
QPSDQVGKVIY

SEQ ID NO: 9986 - protein, 9 aa, synthetic construct
QPSFPTPQL

SEQ ID NO: 9987 - protein, 9 aa, synthetic construct
QPSPIVPAL

SEQ ID NO: 9988 - protein, 8 aa, synthetic construct
QPSPLALL

SEQ ID NO: 9989 - protein, 9 aa, synthetic construct
QPTVRITEL

SEQ ID NO: 9990 - protein, 9 aa, synthetic construct
QPTYTGAII

SEQ ID NO: 9991 - protein, 9 aa, synthetic construct
QPVEPLPGF

SEQ ID NO: 9992 - protein, 9 aa, synthetic construct
QPVKSFPTM

SEQ ID NO: 9993 - protein, 10 aa, synthetic construct
QPVKVLGENY

SEQ ID NO: 9994 - protein, 9 aa, synthetic construct
QPVPPYGMY

SEQ ID NO: 9995 - protein, 8 aa, synthetic construct
QPVPRSVL

SEQ ID NO: 9996 - protein, 9 aa, synthetic construct
QPVTLPCTY

SEQ ID NO: 9997 - protein, 9 aa, synthetic construct
QPWNGQYSL

SEQ ID NO: 9998 - protein, 9 aa, synthetic construct
QPWRADVTY

SEQ ID NO: 9999 - protein, 8 aa, synthetic construct
QPYTKEVL

SEQ ID NO: 10000 - protein, 8 aa, synthetic construct
QQFAQMLV

SEQ ID NO: 10001 - protein, 8 aa, synthetic construct
QQIQIQTV

SEQ ID NO: 10002 - protein, 9 aa, synthetic construct
QQIQKQLLI

SEQ ID NO: 10003 - protein, 9 aa, synthetic construct
QQKKFCFSI

SEQ ID NO: 10004 - protein, 9 aa, synthetic construct
QQKLLDSTK

SEQ ID NO: 10005 - protein, 9 aa, synthetic construct
QQLQIIHRV

SEQ ID NO: 10006 - protein, 9 aa, synthetic construct
QQLYWSHPR

SEQ ID NO: 10007 - protein, 8 aa, synthetic construct
QQQQVPVV

SEQ ID NO: 10008 - protein, 9 aa, synthetic construct
QQRLLLVTV

SEQ ID NO: 10009 - protein, 8 aa, synthetic construct
QQVILVQV

SEQ ID NO: 10010 - protein, 8 aa, synthetic construct
QQYRALTV

SEQ ID NO: 10011 - protein, 11 aa, synthetic construct
QRAGLQFPVGR

SEQ ID NO: 10012 - protein, 9 aa, synthetic construct
QRALLLQQL

SEQ ID NO: 10013 - protein, 9 aa, synthetic construct
QRCPIVDTF

SEQ ID NO: 10014 - protein, 9 aa, synthetic construct
QRFFSDCKI

SEQ ID NO: 10015 - protein, 10 aa, synthetic construct
QRFPKTPSKY

SEQ ID NO: 10016 - protein, 11 aa, synthetic construct
QRFPKTPSKYL

SEQ ID NO: 10017 - protein, 9 aa, synthetic construct
QRFPLSFGF

SEQ ID NO: 10018 - protein, 9 aa, synthetic construct
QRFQKYFNV

SEQ ID NO: 10019 - protein, 10 aa, synthetic construct
QRFSHQGVQL

SEQ ID NO: 10020 - protein, 9 aa, synthetic construct
QRGLFVIRR

SEQ ID NO: 10021 - protein, 9 aa, synthetic construct
QRHDGAFLI

SEQ ID NO: 10022 - protein, 9 aa, synthetic construct
QRHGVFLVR

SEQ ID NO: 10023 - protein, 9 aa, synthetic construct
QRHSIVSRF

SEQ ID NO: 10024 - protein, 11 aa, synthetic construct
QRIEHLIGKKL

SEQ ID NO: 10025 - protein, 9 aa, synthetic construct
QRILNSHCF

SEQ ID NO: 10026 - protein, 11 aa, synthetic construct
QRKFLQAIHQL

SEQ ID NO: 10027 - protein, 9 aa, synthetic construct
QRKNICQFL

SEQ ID NO: 10028 - protein, 10 aa, synthetic construct
QRLGTQPYFF

SEQ ID NO: 10029 - protein, 10 aa, synthetic construct
QRLIFAGKQL

SEQ ID NO: 10030 - protein, 9 aa, synthetic construct
QRLKFRLNL

SEQ ID NO: 10031 - protein, 9 aa, synthetic construct
QRLLAHVTL

SEQ ID NO: 10032 - protein, 9 aa, synthetic construct
QRLNFVNKL

SEQ ID NO: 10033 - protein, 11 aa, synthetic construct
QRLYQAGEGRL

SEQ ID NO: 10034 - protein, 9 aa, synthetic construct
QRNVNIFKF

SEQ ID NO: 10035 - protein, 8 aa, synthetic construct
QRPPTIVL

SEQ ID NO: 10036 - protein, 9 aa, synthetic construct
QRPSAIQLL

SEQ ID NO: 10037 - protein, 9 aa, synthetic construct
QRQDIAFAY

SEQ ID NO: 10038 - protein, 9 aa, synthetic construct
QRSDYYHVL

SEQ ID NO: 10039 - protein, 9 aa, synthetic construct
QRSIILHLI

SEQ ID NO: 10040 - protein, 9 aa, synthetic construct
QRSYLVQYM

SEQ ID NO: 10041 - protein, 9 aa, synthetic construct
QRTGLSPLK

SEQ ID NO: 10042 - protein, 9 aa, synthetic construct
QRVPLSVQL

SEQ ID NO: 10043 - protein, 10 aa, synthetic construct
QRWDEAFRKF

SEQ ID NO: 10044 - protein, 9 aa, synthetic construct
QRWTVQTCL

SEQ ID NO: 10045 - protein, 10 aa, synthetic construct
QSDPWQQELY

SEQ ID NO: 10046 - protein, 9 aa, synthetic construct
QSEIASMLY

SEQ ID NO: 10047 - protein, 9 aa, synthetic construct
QSELLEPVC

SEQ ID NO: 10048 - protein, 9 aa, synthetic construct
QSELVGQLY

SEQ ID NO: 10049 - protein, 8 aa, synthetic construct
QSKILKVI

SEQ ID NO: 10050 - protein, 8 aa, synthetic construct
QSLATPVV

SEQ ID NO: 10051 - protein, 9 aa, synthetic construct
QSPDFVRTV

SEQ ID NO: 10052 - protein, 9 aa, synthetic construct
QSPEGMISL

SEQ ID NO: 10053 - protein, 9 aa, synthetic construct
QSTQRSLAL

SEQ ID NO: 10054 - protein, 8 aa, synthetic construct
QSTRLPLI

SEQ ID NO: 10055 - protein, 10 aa, synthetic construct
QSVTDTNVIL

SEQ ID NO: 10056 - protein, 9 aa, synthetic construct
QTAPLRAEL

SEQ ID NO: 10057 - protein, 9 aa, synthetic construct
QTCRLLLSY

SEQ ID NO: 10058 - protein, 9 aa, synthetic construct
QTDFGMYDY

SEQ ID NO: 10059 - protein, 9 aa, synthetic construct
QTDISISPA

SEQ ID NO: 10060 - protein, 9 aa, synthetic construct
QTDNIIYVY

SEQ ID NO: 10061 - protein, 9 aa, synthetic construct
QTDPTLLSV

SEQ ID NO: 10062 - protein, 10 aa, synthetic construct
QTDQMVFNAY

SEQ ID NO: 10063 - protein, 9 aa, synthetic construct
QTEDNMLFY

SEQ ID NO: 10064 - protein, 9 aa, synthetic construct
QTKSFTVDI

SEQ ID NO: 10065 - protein, 9 aa, synthetic construct
QTPGFLKLL

SEQ ID NO: 10066 - protein, 9 aa, synthetic construct
QVCAIIERV

SEQ ID NO: 10067 - protein, 10 aa, synthetic construct
QVDPLSALKY

SEQ ID NO: 10068 - protein, 9 aa, synthetic construct
QVNDLTTAL

SEQ ID NO: 10069 - protein, 10 aa, synthetic construct
QVNMPYVMIP

SEQ ID NO: 10070 - protein, 9 aa, synthetic construct
QVYGGVTYY

SEQ ID NO: 10071 - protein, 9 aa, synthetic construct
QWDLVENYL

SEQ ID NO: 10072 - protein, 9 aa, synthetic construct
QYDEAVAQF

SEQ ID NO: 10073 - protein, 9 aa, synthetic construct
QYILFPLRF

SEQ ID NO: 10074 - protein, 9 aa, synthetic construct
QYKDVPITY

SEQ ID NO: 10075 - protein, 9 aa, synthetic construct
QYLPHVARL

SEQ ID NO: 10076 - protein, 9 aa, synthetic construct
QMLAVVETI

SEQ ID NO: 10077 - protein, 9 aa, synthetic construct
QMSNITVTY

SEQ ID NO: 10078 - protein, 9 aa, synthetic construct
RAAPHRISL

SEQ ID NO: 10079 - protein, 9 aa, synthetic construct
RAIEIYTDM

SEQ ID NO: 10080 - protein, 9 aa, synthetic construct
RAKAIIVEF

SEQ ID NO: 10081 - protein, 8 aa, synthetic construct
RALDIERK

SEQ ID NO: 10082 - protein, 9 aa, synthetic construct
RAPEVILEL

SEQ ID NO: 10083 - protein, 10 aa, synthetic construct
RAVDFFGAFY

SEQ ID NO: 10084 - protein, 9 aa, synthetic construct
RAYLFAHAV

SEQ ID NO: 10085 - protein, 10 aa, synthetic construct
RAYPHNLMTF

SEQ ID NO: 10086 - protein, 9 aa, synthetic construct
RAYPHVFTK

SEQ ID NO: 10087 - protein, 9 aa, synthetic construct
RCTSISWEL

SEQ ID NO: 10088 - protein, 11 aa, synthetic construct
RDDLYAEQMER

SEQ ID NO: 10089 - protein, 9 aa, synthetic construct
RDYAFVHFT

SEQ ID NO: 10090 - protein, 10 aa, synthetic construct
REAAFSLAEA

SEQ ID NO: 10091 - protein, 9 aa, synthetic construct
READGILKP

SEQ ID NO: 10092 - protein, 9 aa, synthetic construct
REAEFTKSI

SEQ ID NO: 10093 - protein, 10 aa, synthetic construct
REAEFTKSIA

SEQ ID NO: 10094 - protein, 9 aa, synthetic construct
REAEIYQTV

SEQ ID NO: 10095 - protein, 9 aa, synthetic construct
REAESFTQL

SEQ ID NO: 10096 - protein, 9 aa, synthetic construct
REAQSFISA

SEQ ID NO: 10097 - protein, 11 aa, synthetic construct
REEDAALFKAW

SEQ ID NO: 10098 - protein, 10 aa, synthetic construct
REEVIDFSKP

SEQ ID NO: 10099 - protein, 9 aa, synthetic construct
REFDFFNKI

SEQ ID NO: 10100 - protein, 10 aa, synthetic construct
REFDKRFTSV

SEQ ID NO: 10101 - protein, 9 aa, synthetic construct
REFKQFVEA

SEQ ID NO: 10102 - protein, 9 aa, synthetic construct
REFSDFIRV

SEQ ID NO: 10103 - protein, 9 aa, synthetic construct
REFSTFYES

SEQ ID NO: 10104 - protein, 10 aa, synthetic construct
REFSTFYESL

SEQ ID NO: 10105 - protein, 10 aa, synthetic construct
REGDLLFTVA

SEQ ID NO: 10106 - protein, 9 aa, synthetic construct
REGDVITII

SEQ ID NO: 10107 - protein, 9 aa, synthetic construct
REHPWEVMP

SEQ ID NO: 10108 - protein, 9 aa, synthetic construct
REHQFYETL

SEQ ID NO: 10109 - protein, 9 aa, synthetic construct
REHSAFQAP

SEQ ID NO: 10110 - protein, 9 aa, synthetic construct
REHSVFTGV

SEQ ID NO: 10111 - protein, 11 aa, synthetic construct
REIAQDFKTDL

SEQ ID NO: 10112 - protein, 11 aa, synthetic construct
REIEIPLGELF

SEQ ID NO: 10113 - protein, 9 aa, synthetic construct
REINYILRV

SEQ ID NO: 10114 - protein, 8 aa, synthetic construct
REIVHIQA

SEQ ID NO: 10115 - protein, 9 aa, synthetic construct
RELHLQVVA

SEQ ID NO: 10116 - protein, 9 aa, synthetic construct
RELPFTKSA

SEQ ID NO: 10117 - protein, 10 aa, synthetic construct
RELQSQIQEA

SEQ ID NO: 10118 - protein, 9 aa, synthetic construct
REMDSCPVV

SEQ ID NO: 10119 - protein, 11 aa, synthetic construct
RENLEEEAIIM

SEQ ID NO: 10120 - protein, 9 aa, synthetic construct
RENVFKLLP

SEQ ID NO: 10121 - protein, 9 aa, synthetic construct
RESVFKLLP

SEQ ID NO: 10122 - protein, 10 aa, synthetic construct
REVDPLRIPP

SEQ ID NO: 10123 - protein, 10 aa, synthetic construct
REVEGLKDLL

SEQ ID NO: 10124 - protein, 11 aa, synthetic construct
REVFPDTKVYA

SEQ ID NO: 10125 - protein, 10 aa, synthetic construct
REVLEKQPVL

SEQ ID NO: 10126 - protein, 9 aa, synthetic construct
REVLPLNQA

SEQ ID NO: 10127 - protein, 10 aa, synthetic construct
REVQYLLNKA

SEQ ID NO: 10128 - protein, 9 aa, synthetic construct
REVYSILQA

SEQ ID NO: 10129 - protein, 9 aa, synthetic construct
REWSGKEKW

SEQ ID NO: 10130 - protein, 10 aa, synthetic construct
REYDTSKIEA

SEQ ID NO: 10131 - protein, 9 aa, synthetic construct
REYLRFLDV

SEQ ID NO: 10132 - protein, 11 aa, synthetic construct
REYQDLLNVKM

SEQ ID NO: 10133 - protein, 9 aa, synthetic construct
REYQVKLQA

SEQ ID NO: 10134 - protein, 9 aa, synthetic construct
REYSRYLHA

SEQ ID NO: 10135 - protein, 9 aa, synthetic construct
RFCDNVWTF

SEQ ID NO: 10136 - protein, 9 aa, synthetic construct
RFDEAYIYM

SEQ ID NO: 10137 - protein, 10 aa, synthetic construct
RFDEILEASD

SEQ ID NO: 10138 - protein, 9 aa, synthetic construct
RFDESMQVF

SEQ ID NO: 10139 - protein, 9 aa, synthetic construct
RFDSDVGMF

SEQ ID NO: 10140 - protein, 9 aa, synthetic construct
RFILNLPTF

SEQ ID NO: 10141 - protein, 11 aa, synthetic construct
RFIPPWLKKQK

SEQ ID NO: 10142 - protein, 8 aa, synthetic construct
RFIQLLKV

SEQ ID NO: 10143 - protein, 9 aa, synthetic construct
RFKDRIVSM

SEQ ID NO: 10144 - protein, 9 aa, synthetic construct
RFLEVETSW

SEQ ID NO: 10145 - protein, 11 aa, synthetic construct
RFVPLPASAKW

SEQ ID NO: 10146 - protein, 11 aa, synthetic construct
RGDINLLMLGD

SEQ ID NO: 10147 - protein, 9 aa, synthetic construct
RIADISQVY

SEQ ID NO: 10148 - protein, 9 aa, synthetic construct
RIAEFAFEY

SEQ ID NO: 10149 - protein, 11 aa, synthetic construct
RIEDNLPAGEE

SEQ ID NO: 10150 - protein, 11 aa, synthetic construct
RIFAPNHVVAK

SEQ ID NO: 10151 - protein, 10 aa, synthetic construct
RIHESSPLDL

SEQ ID NO: 10152 - protein, 9 aa, synthetic construct
RIIDLVLQK

SEQ ID NO: 10153 - protein, 9 aa, synthetic construct
RIIDVVYNA

SEQ ID NO: 10154 - protein, 9 aa, synthetic construct
RIIEETLAL

SEQ ID NO: 10155 - protein, 10 aa, synthetic construct
RIIEETLALK

SEQ ID NO: 10156 - protein, 9 aa, synthetic construct
RIKDLGQFY

SEQ ID NO: 10157 - protein, 9 aa, synthetic construct
RIKLGLKSL

SEQ ID NO: 10158 - protein, 9 aa, synthetic construct
RIKLYSESL

SEQ ID NO: 10159 - protein, 9 aa, synthetic construct
RILFFNTPK

SEQ ID NO: 10160 - protein, 9 aa, synthetic construct
RIPDQLGYL

SEQ ID NO: 10161 - protein, 9 aa, synthetic construct
RLAEVVHEL

SEQ ID NO: 10162 - protein, 10 aa, synthetic construct
RLAEWKATKL

SEQ ID NO: 10163 - protein, 9 aa, synthetic construct
RLAGMTLTY

SEQ ID NO: 10164 - protein, 9 aa, synthetic construct
RLASTLVHL

SEQ ID NO: 10165 - protein, 9 aa, synthetic construct
RLAVYIDRV

SEQ ID NO: 10166 - protein, 10 aa, synthetic construct
RLCECSVAEL

SEQ ID NO: 10167 - protein, 9 aa, synthetic construct
RLDLARKEL

SEQ ID NO: 10168 - protein, 10 aa, synthetic construct
RLEIEPEWAY

SEQ ID NO: 10169 - protein, 9 aa, synthetic construct
RLFDWHIQL

SEQ ID NO: 10170 - protein, 9 aa, synthetic construct
RLFFHCSQY

SEQ ID NO: 10171 - protein, 9 aa, synthetic construct
RLFIGGIPK

SEQ ID NO: 10172 - protein, 11 aa, synthetic construct
RLGEAEGLMKV

SEQ ID NO: 10173 - protein, 9 aa, synthetic construct
RLHDVLMEL

SEQ ID NO: 10174 - protein, 9 aa, synthetic construct
RLHERLVAI

SEQ ID NO: 10175 - protein, 9 aa, synthetic construct
RLIGHQEAF

SEQ ID NO: 10176 - protein, 8 aa, synthetic construct
RLILSPDM

SEQ ID NO: 10177 - protein, 11 aa, synthetic construct
RLINTQAIFAK

SEQ ID NO: 10178 - protein, 8 aa, synthetic construct
RLKPKVLL

SEQ ID NO: 10179 - protein, 9 aa, synthetic construct
RLLDGAFKL

SEQ ID NO: 10180 - protein, 10 aa, synthetic construct
RLLDLENIQI

SEQ ID NO: 10181 - protein, 9 aa, synthetic construct
RLLDSEIKI

SEQ ID NO: 10182 - protein, 9 aa, synthetic construct
RLLEVPVML

SEQ ID NO: 10183 - protein, 9 aa, synthetic construct
RLLFKGKAL

SEQ ID NO: 10184 - protein, 9 aa, synthetic construct
RLLHEMILV

SEQ ID NO: 10185 - protein, 8 aa, synthetic construct
RLLLLPRV

SEQ ID NO: 10186 - protein, 10 aa, synthetic construct
RLLLPGELAK

SEQ ID NO: 10187 - protein, 9 aa, synthetic construct
RLLNILMQL

SEQ ID NO: 10188 - protein, 11 aa, synthetic construct
RLLPGNATISK

SEQ ID NO: 10189 - protein, 9 aa, synthetic construct
RLLQKVLAY

SEQ ID NO: 10190 - protein, 9 aa, synthetic construct
RLLSFVVLA

SEQ ID NO: 10191 - protein, 10 aa, synthetic construct
RLPAFTLSHL

SEQ ID NO: 10192 - protein, 9 aa, synthetic construct
RLPEAIEEV

SEQ ID NO: 10193 - protein, 9 aa, synthetic construct
RLPEHCIEY

SEQ ID NO: 10194 - protein, 9 aa, synthetic construct
RLPHSTAAL

SEQ ID NO: 10195 - protein, 10 aa, synthetic construct
RLQEDPPAGV

SEQ ID NO: 10196 - protein, 10 aa, synthetic construct
RLQEDPPVGV

SEQ ID NO: 10197 - protein, 9 aa, synthetic construct
RLQEEINEV

SEQ ID NO: 10198 - protein, 10 aa, synthetic construct
RLQRPGSARL

SEQ ID NO: 10199 - protein, 10 aa, synthetic construct
RLSEQELEAL

SEQ ID NO: 10200 - protein, 9 aa, synthetic construct
RLTPKLMEV

SEQ ID NO: 10201 - protein, 9 aa, synthetic construct
RLTTPVFGK

SEQ ID NO: 10202 - protein, 9 aa, synthetic construct
RLVEIQYEL

SEQ ID NO: 10203 - protein, 9 aa, synthetic construct
RLYDAYELK

SEQ ID NO: 10204 - protein, 9 aa, synthetic construct
RLYDGLFKV

SEQ ID NO: 10205 - protein, 9 aa, synthetic construct
RLYDTHITV

SEQ ID NO: 10206 - protein, 9 aa, synthetic construct
RLYFSQQTY

SEQ ID NO: 10207 - protein, 10 aa, synthetic construct
RLYPEGLAQL

SEQ ID NO: 10208 - protein, 10 aa, synthetic construct
RLYPWGVVEV

SEQ ID NO: 10209 - protein, 9 aa, synthetic construct
RLYQHAVEY

SEQ ID NO: 10210 - protein, 9 aa, synthetic construct
RLYVHTLTI

SEQ ID NO: 10211 - protein, 9 aa, synthetic construct
RMLPHAPGV

SEQ ID NO: 10212 - protein, 9 aa, synthetic construct
RNKLKYLAF

SEQ ID NO: 10213 - protein, 9 aa, synthetic construct
RNLHVVFTM

SEQ ID NO: 10214 - protein, 8 aa, synthetic construct
RNYLHYSL

SEQ ID NO: 10215 - protein, 9 aa, synthetic construct
RPAALTALL

SEQ ID NO: 10216 - protein, 11 aa, synthetic construct
RPAALTALLLL

SEQ ID NO: 10217 - protein, 10 aa, synthetic construct
RPAAPGQTPL

SEQ ID NO: 10218 - protein, 10 aa, synthetic construct
RPADKRSFIP

SEQ ID NO: 10219 - protein, 10 aa, synthetic construct
RPADSMLNVL

SEQ ID NO: 10220 - protein, 9 aa, synthetic construct
RPAERLDYL

SEQ ID NO: 10221 - protein, 10 aa, synthetic construct
RPAEVGGMQL

SEQ ID NO: 10222 - protein, 9 aa, synthetic construct
RPAFKGLTF

SEQ ID NO: 10223 - protein, 10 aa, synthetic construct
RPAIVQNITF

SEQ ID NO: 10224 - protein, 9 aa, synthetic construct
RPALFANLF

SEQ ID NO: 10225 - protein, 10 aa, synthetic construct
RPALPLILGL

SEQ ID NO: 10226 - protein, 10 aa, synthetic construct
RPANHRQLTF

SEQ ID NO: 10227 - protein, 9 aa, synthetic construct
RPAPLSAEL

SEQ ID NO: 10228 - protein, 9 aa, synthetic construct
RPAPPAQSL

SEQ ID NO: 10229 - protein, 9 aa, synthetic construct
RPAQFLPEM

SEQ ID NO: 10230 - protein, 9 aa, synthetic construct
RPAQLHIGF

SEQ ID NO: 10231 - protein, 9 aa, synthetic construct
RPAQVSQPF

SEQ ID NO: 10232 - protein, 10 aa, synthetic construct
RPDDKRILEF

SEQ ID NO: 10233 - protein, 11 aa, synthetic construct
RPDDVHVNIRL

SEQ ID NO: 10234 - protein, 10 aa, synthetic construct
RPDLKRQSLL

SEQ ID NO: 10235 - protein, 10 aa, synthetic construct
RPDPAGHLTL

SEQ ID NO: 10236 - protein, 11 aa, synthetic construct
RPDVGRYLREL

SEQ ID NO: 10237 - protein, 9 aa, synthetic construct
RPERVKPFM

SEQ ID NO: 10238 - protein, 9 aa, synthetic construct
RPFAGFEDF

SEQ ID NO: 10239 - protein, 9 aa, synthetic construct
RPFEDQTSL

SEQ ID NO: 10240 - protein, 8 aa, synthetic construct
RPFEKSRL

SEQ ID NO: 10241 - protein, 9 aa, synthetic construct
RPFEQPQEY

SEQ ID NO: 10242 - protein, 11 aa, synthetic construct
RPFGLGSESPY

SEQ ID NO: 10243 - protein, 9 aa, synthetic construct
RPFHGWTSL

SEQ ID NO: 10244 - protein, 9 aa, synthetic construct
RPFTNLESA

SEQ ID NO: 10245 - protein, 9 aa, synthetic construct
RPGYRVKEI

SEQ ID NO: 10246 - protein, 10 aa, synthetic construct
RPHGGKSLLL

SEQ ID NO: 10247 - protein, 9 aa, synthetic construct
RPHKPGLYL

SEQ ID NO: 10248 - protein, 8 aa, synthetic construct
RPHLAMVL

SEQ ID NO: 10249 - protein, 9 aa, synthetic construct
RPHSSLREL

SEQ ID NO: 10250 - protein, 9 aa, synthetic construct
RPHTVLTVI

SEQ ID NO: 10251 - protein, 9 aa, synthetic construct
RPHYSLRTL

SEQ ID NO: 10252 - protein, 9 aa, synthetic construct
RPIFIITEY

SEQ ID NO: 10253 - protein, 10 aa, synthetic construct
RPIFPGKHYL

SEQ ID NO: 10254 - protein, 10 aa, synthetic construct
RPIKDSMFSL

SEQ ID NO: 10255 - protein, 9 aa, synthetic construct
RPIYPVEEL

SEQ ID NO: 10256 - protein, 9 aa, synthetic construct
RPKAKEIQL

SEQ ID NO: 10257 - protein, 9 aa, synthetic construct
RPKALTQVL

SEQ ID NO: 10258 - protein, 9 aa, synthetic construct
RPKDPNNLL

SEQ ID NO: 10259 - protein, 9 aa, synthetic construct
RPKLIGEEL

SEQ ID NO: 10260 - protein, 9 aa, synthetic construct
RPKNLMQTL

SEQ ID NO: 10261 - protein, 9 aa, synthetic construct
RPKPIITSV

SEQ ID NO: 10262 - protein, 11 aa, synthetic construct
RPKPSSSPVIF

SEQ ID NO: 10263 - protein, 10 aa, synthetic construct
RPKQEKAFSL

SEQ ID NO: 10264 - protein, 9 aa, synthetic construct
RPKYPGIKF

SEQ ID NO: 10265 - protein, 9 aa, synthetic construct
RPLHALQVL

SEQ ID NO: 10266 - protein, 9 aa, synthetic construct
RPLLKAITA

SEQ ID NO: 10267 - protein, 9 aa, synthetic construct
RPLSKTVRF

SEQ ID NO: 10268 - protein, 9 aa, synthetic construct
RPLYKNIVL

SEQ ID NO: 10269 - protein, 9 aa, synthetic construct
RPNDIYVNM

SEQ ID NO: 10270 - protein, 9 aa, synthetic construct
RPNGVITGL

SEQ ID NO: 10271 - protein, 9 aa, synthetic construct
RPNPQEFTY

SEQ ID NO: 10272 - protein, 9 aa, synthetic construct
RPPPIGAEV

SEQ ID NO: 10273 - protein, 10 aa, synthetic construct
RPPYYTPNQL

SEQ ID NO: 10274 - protein, 10 aa, synthetic construct
RPQAPATVGL

SEQ ID NO: 10275 - protein, 9 aa, synthetic construct
RPQGGQDIL

SEQ ID NO: 10276 - protein, 9 aa, synthetic construct
RPQKVCSFL

SEQ ID NO: 10277 - protein, 10 aa, synthetic construct
RPQLHKNTVL

SEQ ID NO: 10278 - protein, 9 aa, synthetic construct
RPQLKGVVL

SEQ ID NO: 10279 - protein, 9 aa, synthetic construct
RPQLLKNAL

SEQ ID NO: 10280 - protein, 9 aa, synthetic construct
RPQTGLSFL

SEQ ID NO: 10281 - protein, 11 aa, synthetic construct
RPRAGASISTL

SEQ ID NO: 10282 - protein, 9 aa, synthetic construct
RPREAEVRF

SEQ ID NO: 10283 - protein, 10 aa, synthetic construct
RPREAEVRFL

SEQ ID NO: 10284 - protein, 9 aa, synthetic construct
RPRFEPVHF

SEQ ID NO: 10285 - protein, 10 aa, synthetic construct
RPRKAFLLLL

SEQ ID NO: 10286 - protein, 10 aa, synthetic construct
RPRLNWGIHL

SEQ ID NO: 10287 - protein, 10 aa, synthetic construct
RPRLTSNEKL

SEQ ID NO: 10288 - protein, 10 aa, synthetic construct
RPRPDEERPL

SEQ ID NO: 10289 - protein, 9 aa, synthetic construct
RPRPGNILL

SEQ ID NO: 10290 - protein, 11 aa, synthetic construct
RPRPGNILLQL

SEQ ID NO: 10291 - protein, 10 aa, synthetic construct
RPRPSEDTFL

SEQ ID NO: 10292 - protein, 11 aa, synthetic construct
RPRPSSAHVGL

SEQ ID NO: 10293 - protein, 11 aa, synthetic construct
RPRPTEATVSL

SEQ ID NO: 10294 - protein, 9 aa, synthetic construct
RPSAAGINL

SEQ ID NO: 10295 - protein, 10 aa, synthetic construct
RPSGEAFVEL

SEQ ID NO: 10296 - protein, 11 aa, synthetic construct
RPSGLHGDVSL

SEQ ID NO: 10297 - protein, 9 aa, synthetic construct
RPSGPGPEL

SEQ ID NO: 10298 - protein, 8 aa, synthetic construct
RPSLLPLH

SEQ ID NO: 10299 - protein, 10 aa, synthetic construct
RPSSQYIVAL

SEQ ID NO: 10300 - protein, 9 aa, synthetic construct
RPTDKPLRL

SEQ ID NO: 10301 - protein, 10 aa, synthetic construct
RPVAPSGTAL

SEQ ID NO: 10302 - protein, 10 aa, synthetic construct
RPVAVALDTK

SEQ ID NO: 10303 - protein, 9 aa, synthetic construct
RPVIDNPNY

SEQ ID NO: 10304 - protein, 9 aa, synthetic construct
RPVQKLIRL

SEQ ID NO: 10305 - protein, 11 aa, synthetic construct
RPVSIEGSEEY

SEQ ID NO: 10306 - protein, 10 aa, synthetic construct
RPVSSTGINF

SEQ ID NO: 10307 - protein, 9 aa, synthetic construct
RPVVDMVTL

SEQ ID NO: 10308 - protein, 10 aa, synthetic construct
RPWLEGRHTL

SEQ ID NO: 10309 - protein, 9 aa, synthetic construct
RPWLRPAAL

SEQ ID NO: 10310 - protein, 9 aa, synthetic construct
RPWSNSRGL

SEQ ID NO: 10311 - protein, 9 aa, synthetic construct
RPWTVMESL

SEQ ID NO: 10312 - protein, 8 aa, synthetic construct
RPYAKHWL

SEQ ID NO: 10313 - protein, 11 aa, synthetic construct
RPYAPINANAI

SEQ ID NO: 10314 - protein, 9 aa, synthetic construct
RPYEPINSI

SEQ ID NO: 10315 - protein, 11 aa, synthetic construct
RPYNEPTNAQF

SEQ ID NO: 10316 - protein, 10 aa, synthetic construct
RPYPSPGAVL

SEQ ID NO: 10317 - protein, 9 aa, synthetic construct
RPYSNVSNL

SEQ ID NO: 10318 - protein, 9 aa, synthetic construct
RPYSQVNVL

SEQ ID NO: 10319 - protein, 10 aa, synthetic construct
RPYTNKVITL

SEQ ID NO: 10320 - protein, 9 aa, synthetic construct
RQAVPLFSK

SEQ ID NO: 10321 - protein, 8 aa, synthetic construct
RQFAAQTV

SEQ ID NO: 10322 - protein, 9 aa, synthetic construct
RQFEVKFEV

SEQ ID NO: 10323 - protein, 9 aa, synthetic construct
RQFSTPFQL

SEQ ID NO: 10324 - protein, 8 aa, synthetic construct
RQFVPIKV

SEQ ID NO: 10325 - protein, 9 aa, synthetic construct
RQHEIVLKV

SEQ ID NO: 10326 - protein, 8 aa, synthetic construct
RQHPQPYI

SEQ ID NO: 10327 - protein, 9 aa, synthetic construct
RQIDQFLVV

SEQ ID NO: 10328 - protein, 9 aa, synthetic construct
RQLGHALLV

SEQ ID NO: 10329 - protein, 9 aa, synthetic construct
RQLKKLISL

SEQ ID NO: 10330 - protein, 11 aa, synthetic construct
RQLPAVHPIFK

SEQ ID NO: 10331 - protein, 9 aa, synthetic construct
RQNIYKEVI

SEQ ID NO: 10332 - protein, 11 aa, synthetic construct
RQYAKDIGFIK

SEQ ID NO: 10333 - protein, 10 aa, synthetic construct
RQYDKFLTHF

SEQ ID NO: 10334 - protein, 8 aa, synthetic construct
RQYYLSKI

SEQ ID NO: 10335 - protein, 8 aa, synthetic construct
RQYYMQYL

SEQ ID NO: 10336 - protein, 9 aa, synthetic construct
RRAELVFKC

SEQ ID NO: 10337 - protein, 9 aa, synthetic construct
RRAFIGIGF

SEQ ID NO: 10338 - protein, 11 aa, synthetic construct
RRAIIPSHLAY

SEQ ID NO: 10339 - protein, 9 aa, synthetic construct
RRAPVVVRL

SEQ ID NO: 10340 - protein, 9 aa, synthetic construct
RRAVLLQRF

SEQ ID NO: 10341 - protein, 10 aa, synthetic construct
RRAYLEGTCV

SEQ ID NO: 10342 - protein, 9 aa, synthetic construct
RRDFQIRVL

SEQ ID NO: 10343 - protein, 9 aa, synthetic construct
RRDNYVPEV

SEQ ID NO: 10344 - protein, 9 aa, synthetic construct
RRFALKATY

SEQ ID NO: 10345 - protein, 10 aa, synthetic construct
RRFAPDISSY

SEQ ID NO: 10346 - protein, 11 aa, synthetic construct
RRFDAMPFTLR

SEQ ID NO: 10347 - protein, 11 aa, synthetic construct
RRFDPKLFLVF

SEQ ID NO: 10348 - protein, 9 aa, synthetic construct
RRFEYKYSF

SEQ ID NO: 10349 - protein, 9 aa, synthetic construct
RRFFPYYVY

SEQ ID NO: 10350 - protein, 9 aa, synthetic construct
RRFKWAIEL

SEQ ID NO: 10351 - protein, 9 aa, synthetic construct
RRFLAVRTL

SEQ ID NO: 10352 - protein, 11 aa, synthetic construct
RRFLTQPQVVA

SEQ ID NO: 10353 - protein, 9 aa, synthetic construct
RRFPDLNRL

SEQ ID NO: 10354 - protein, 8 aa, synthetic construct
RRFSPHFL

SEQ ID NO: 10355 - protein, 10 aa, synthetic construct
RRFVNVVPTF

SEQ ID NO: 10356 - protein, 9 aa, synthetic construct
RRFMQTFVL

SEQ ID NO: 10357 - protein, 9 aa, synthetic construct
RRGDFIHVM

SEQ ID NO: 10358 - protein, 9 aa, synthetic construct
RRIAEVAKL

SEQ ID NO: 10359 - protein, 9 aa, synthetic construct
RRIEIAHAL

SEQ ID NO: 10360 - protein, 9 aa, synthetic construct
RRIEIAHTL

SEQ ID NO: 10361 - protein, 10 aa, synthetic construct
RRIELLEEVK

SEQ ID NO: 10362 - protein, 10 aa, synthetic construct
RRIILEAEKM

SEQ ID NO: 10363 - protein, 11 aa, synthetic construct
RRILDSAEFIK

SEQ ID NO: 10364 - protein, 9 aa, synthetic construct
RRILVATNL

SEQ ID NO: 10365 - protein, 9 aa, synthetic construct
RRIQVVHAF

SEQ ID NO: 10366 - protein, 10 aa, synthetic construct
RRISGVDRYY

SEQ ID NO: 10367 - protein, 8 aa, synthetic construct
RRIYPFLL

SEQ ID NO: 10368 - protein, 9 aa, synthetic construct
RRKDGVFLY

SEQ ID NO: 10369 - protein, 10 aa, synthetic construct
RRLALFPGVA

SEQ ID NO: 10370 - protein, 9 aa, synthetic construct
RRLDPIPQL

SEQ ID NO: 10371 - protein, 10 aa, synthetic construct
RRLDPIPQLK

SEQ ID NO: 10372 - protein, 10 aa, synthetic construct
RRLEPAIQKF

SEQ ID NO: 10373 - protein, 9 aa, synthetic construct
RRLGLAQKL

SEQ ID NO: 10374 - protein, 9 aa, synthetic construct
RRLLALIYL

SEQ ID NO: 10375 - protein, 9 aa, synthetic construct
RRLLEVHQL

SEQ ID NO: 10376 - protein, 9 aa, synthetic construct
RRLLLLLTL

SEQ ID NO: 10377 - protein, 9 aa, synthetic construct
RRLLLLPLL

SEQ ID NO: 10378 - protein, 11 aa, synthetic construct
RRLLVDSKVSL

SEQ ID NO: 10379 - protein, 9 aa, synthetic construct
RRLNHYVLY

SEQ ID NO: 10380 - protein, 11 aa, synthetic construct
RRLPNLPSQSR

SEQ ID NO: 10381 - protein, 10 aa, synthetic construct
RRLQIEDFEA

SEQ ID NO: 10382 - protein, 9 aa, synthetic construct
RRLSADIRL

SEQ ID NO: 10383 - protein, 9 aa, synthetic construct
RRLSELLRY

SEQ ID NO: 10384 - protein, 10 aa, synthetic construct
RRLVGLASLR

SEQ ID NO: 10385 - protein, 9 aa, synthetic construct
RRNDKIIVF

SEQ ID NO: 10386 - protein, 10 aa, synthetic construct
RRNGEALVRF

SEQ ID NO: 10387 - protein, 10 aa, synthetic construct
RRNGPLPLKY

SEQ ID NO: 10388 - protein, 10 aa, synthetic construct
RRNGTLPWLR

SEQ ID NO: 10389 - protein, 11 aa, synthetic construct
RRNPDTQWITK

SEQ ID NO: 10390 - protein, 8 aa, synthetic construct
RRPPRYLL

SEQ ID NO: 10391 - protein, 10 aa, synthetic construct
RRSDVEILGY

SEQ ID NO: 10392 - protein, 10 aa, synthetic construct
RRSLESVLSR

SEQ ID NO: 10393 - protein, 9 aa, synthetic construct
RRSQVIEKF

SEQ ID NO: 10394 - protein, 10 aa, synthetic construct
RRSSIPITVR

SEQ ID NO: 10395 - protein, 10 aa, synthetic construct
RRVIVCNTKL

SEQ ID NO: 10396 - protein, 9 aa, synthetic construct
RRVLVQVSY

SEQ ID NO: 10397 - protein, 11 aa, synthetic construct
RRVVSEIPVLK

SEQ ID NO: 10398 - protein, 10 aa, synthetic construct
RRWLPAGDAL

SEQ ID NO: 10399 - protein, 11 aa, synthetic construct
RRYAPDPVLVR

SEQ ID NO: 10400 - protein, 11 aa, synthetic construct
RRYLENGKETL

SEQ ID NO: 10401 - protein, 9 aa, synthetic construct
RRYPIARVF

SEQ ID NO: 10402 - protein, 11 aa, synthetic construct
RRYQKSTELLI

SEQ ID NO: 10403 - protein, 11 aa, synthetic construct
RRMLEFDPAQR

SEQ ID NO: 10404 - protein, 10 aa, synthetic construct
RSDCLGEHLY

SEQ ID NO: 10405 - protein, 9 aa, synthetic construct
RSFPSVREL

SEQ ID NO: 10406 - protein, 11 aa, synthetic construct
RSKYDYLMILR

SEQ ID NO: 10407 - protein, 9 aa, synthetic construct
RSPEACCEL

SEQ ID NO: 10408 - protein, 9 aa, synthetic construct
RTADFVFMF

SEQ ID NO: 10409 - protein, 9 aa, synthetic construct
RTAHVILRY

SEQ ID NO: 10410 - protein, 10 aa, synthetic construct
RTDAILLGHY

SEQ ID NO: 10411 - protein, 10 aa, synthetic construct
RTEEGPTLSY

SEQ ID NO: 10412 - protein, 9 aa, synthetic construct
RTFGHLLRY

SEQ ID NO: 10413 - protein, 9 aa, synthetic construct
RTFQEVLAY

SEQ ID NO: 10414 - protein, 10 aa, synthetic construct
RTGKPIAVKL

SEQ ID NO: 10415 - protein, 9 aa, synthetic construct
RTKLSLIMR

SEQ ID NO: 10416 - protein, 9 aa, synthetic construct
RTLQQMLLK

SEQ ID NO: 10417 - protein, 10 aa, synthetic construct
RTPAGNFVTL

SEQ ID NO: 10418 - protein, 9 aa, synthetic construct
RTPLHEIAL

SEQ ID NO: 10419 - protein, 9 aa, synthetic construct
RTTDIVIRI

SEQ ID NO: 10420 - protein, 9 aa, synthetic construct
RTYDLYITY

SEQ ID NO: 10421 - protein, 11 aa, synthetic construct
RTMPLLSLHSR

SEQ ID NO: 10422 - protein, 9 aa, synthetic construct
RVADLTEQY

SEQ ID NO: 10423 - protein, 9 aa, synthetic construct
RVAFTLLEK

SEQ ID NO: 10424 - protein, 10 aa, synthetic construct
RVAPEEHPVL

SEQ ID NO: 10425 - protein, 9 aa, synthetic construct
RVASVMQEY

SEQ ID NO: 10426 - protein, 9 aa, synthetic construct
RVCEVEFVF

SEQ ID NO: 10427 - protein, 10 aa, synthetic construct
RVDPAKGLFY

SEQ ID NO: 10428 - protein, 11 aa, synthetic construct
RVEIMEEESEQ

SEQ ID NO: 10429 - protein, 11 aa, synthetic construct
RVFAAESIIKR

SEQ ID NO: 10430 - protein, 9 aa, synthetic construct
RVFQECLTY

SEQ ID NO: 10431 - protein, 9 aa, synthetic construct
RVFTGVVTK

SEQ ID NO: 10432 - protein, 9 aa, synthetic construct
RVHLRSATL

SEQ ID NO: 10433 - protein, 9 aa, synthetic construct
RVIDLRAEL

SEQ ID NO: 10434 - protein, 8 aa, synthetic construct
RVKIHFKV

SEQ ID NO: 10435 - protein, 9 aa, synthetic construct
RVKLPSKAL

SEQ ID NO: 10436 - protein, 11 aa, synthetic construct
RVLDALVAREK

SEQ ID NO: 10437 - protein, 10 aa, synthetic construct
RVLDFDVKRK

SEQ ID NO: 10438 - protein, 9 aa, synthetic construct
RVLPYPFTH

SEQ ID NO: 10439 - protein, 9 aa, synthetic construct
RVNIPKVLR

SEQ ID NO: 10440 - protein, 11 aa, synthetic construct
RVQEAVESMVK

SEQ ID NO: 10441 - protein, 9 aa, synthetic construct
RVQKIRPSI

SEQ ID NO: 10442 - protein, 11 aa, synthetic construct
RVSEHFSAMFK

SEQ ID NO: 10443 - protein, 9 aa, synthetic construct
RVSLVRKEL

SEQ ID NO: 10444 - protein, 11 aa, synthetic construct
RVVGSELIQKY

SEQ ID NO: 10445 - protein, 9 aa, synthetic construct
RVYDVLVLK

SEQ ID NO: 10446 - protein, 9 aa, synthetic construct
RVYHYFQWR

SEQ ID NO: 10447 - protein, 11 aa, synthetic construct
RVYSPPEWISR

SEQ ID NO: 10448 - protein, 9 aa, synthetic construct
RVMAPRALL

SEQ ID NO: 10449 - protein, 9 aa, synthetic construct
RWDEAFRKF

SEQ ID NO: 10450 - protein, 9 aa, synthetic construct
RWFDKSFTF

SEQ ID NO: 10451 - protein, 10 aa, synthetic construct
RWFQPAIPSW

SEQ ID NO: 10452 - protein, 11 aa, synthetic construct
RWPDLHSHHEL

SEQ ID NO: 10453 - protein, 9 aa, synthetic construct
RYDDMATCM

SEQ ID NO: 10454 - protein, 9 aa, synthetic construct
RYDEMVESM

SEQ ID NO: 10455 - protein, 9 aa, synthetic construct
RYDGQVAVF

SEQ ID NO: 10456 - protein, 8 aa, synthetic construct
RYDLYHTF

SEQ ID NO: 10457 - protein, 9 aa, synthetic construct
RYIPTAAAF

SEQ ID NO: 10458 - protein, 10 aa, synthetic construct
RYLAIVHAVF

SEQ ID NO: 10459 - protein, 9 aa, synthetic construct
RYLDELMKL

SEQ ID NO: 10460 - protein, 9 aa, synthetic construct
RYLDLFTNF

SEQ ID NO: 10461 - protein, 9 aa, synthetic construct
RYLDLFTNY

SEQ ID NO: 10462 - protein, 9 aa, synthetic construct
RYLDLFTSF

SEQ ID NO: 10463 - protein, 10 aa, synthetic construct
RYLDLILNDF

SEQ ID NO: 10464 - protein, 9 aa, synthetic construct
RYLDLLTTW

SEQ ID NO: 10465 - protein, 9 aa, synthetic construct
RYLEKPMEI

SEQ ID NO: 10466 - protein, 9 aa, synthetic construct
RYLEQLHQL

SEQ ID NO: 10467 - protein, 10 aa, synthetic construct
RYLHVEGGNF

SEQ ID NO: 10468 - protein, 9 aa, synthetic construct
RYLNEFEEL

SEQ ID NO: 10469 - protein, 9 aa, synthetic construct
RYLPQTYVV

SEQ ID NO: 10470 - protein, 9 aa, synthetic construct
RYLTGAWRL

SEQ ID NO: 10471 - protein, 9 aa, synthetic construct
RYLTVAAVF

SEQ ID NO: 10472 - protein, 9 aa, synthetic construct
RYLVISEKL

SEQ ID NO: 10473 - protein, 9 aa, synthetic construct
RYPDSHQLF

SEQ ID NO: 10474 - protein, 11 aa, synthetic construct
RYPTSIASLAF

SEQ ID NO: 10475 - protein, 9 aa, synthetic construct
RYTFYVLEF

SEQ ID NO: 10476 - protein, 9 aa, synthetic construct
RYVDQKFVL

SEQ ID NO: 10477 - protein, 10 aa, synthetic construct
RYYKNIGLGF

SEQ ID NO: 10478 - protein, 10 aa, synthetic construct
RMCTATGLYY

SEQ ID NO: 10479 - protein, 10 aa, synthetic construct
RMFAPTKTWR

SEQ ID NO: 10480 - protein, 9 aa, synthetic construct
RMFDMGFEY

SEQ ID NO: 10481 - protein, 9 aa, synthetic construct
RMFFHFSEI

SEQ ID NO: 10482 - protein, 9 aa, synthetic construct
RMNCVLATY

SEQ ID NO: 10483 - protein, 9 aa, synthetic construct
RMYEKALQI

SEQ ID NO: 10484 - protein, 10 aa, synthetic construct
RMYPFQIHSI

SEQ ID NO: 10485 - protein, 11 aa, synthetic construct
SAAAAAAAAAY

SEQ ID NO: 10486 - protein, 9 aa, synthetic construct
SAAEIMAVL

SEQ ID NO: 10487 - protein, 8 aa, synthetic construct
SAANLHLR

SEQ ID NO: 10488 - protein, 9 aa, synthetic construct
SAAQPGVAF

SEQ ID NO: 10489 - protein, 10 aa, synthetic construct
SAARLLFSFY

SEQ ID NO: 10490 - protein, 9 aa, synthetic construct
SAATACLIY

SEQ ID NO: 10491 - protein, 9 aa, synthetic construct
SAAVHSFAF

SEQ ID NO: 10492 - protein, 9 aa, synthetic construct
SACQVGQVF

SEQ ID NO: 10493 - protein, 9 aa, synthetic construct
SACYDVTEY

SEQ ID NO: 10494 - protein, 9 aa, synthetic construct
SADQVALVY

SEQ ID NO: 10495 - protein, 9 aa, synthetic construct
SAFDEAMSY

SEQ ID NO: 10496 - protein, 9 aa, synthetic construct
SAFINLVEF

SEQ ID NO: 10497 - protein, 9 aa, synthetic construct
SAFPEVRSL

SEQ ID NO: 10498 - protein, 10 aa, synthetic construct
SAFPGIDEAM

SEQ ID NO: 10499 - protein, 9 aa, synthetic construct
SAFPHLRVL

SEQ ID NO: 10500 - protein, 9 aa, synthetic construct
SAFPYAHRF

SEQ ID NO: 10501 - protein, 10 aa, synthetic construct
SAFQAPAVKK

SEQ ID NO: 10502 - protein, 10 aa, synthetic construct
SAFQGHDVGF

SEQ ID NO: 10503 - protein, 9 aa, synthetic construct
SAFQTLEKY

SEQ ID NO: 10504 - protein, 8 aa, synthetic construct
SAFRHSYL

SEQ ID NO: 10505 - protein, 9 aa, synthetic construct
SAFSGFPSF

SEQ ID NO: 10506 - protein, 9 aa, synthetic construct
SAFTNRIFF

SEQ ID NO: 10507 - protein, 8 aa, synthetic construct
SAGIIHRV

SEQ ID NO: 10508 - protein, 11 aa, synthetic construct
SAGPHFNPLSR

SEQ ID NO: 10509 - protein, 9 aa, synthetic construct
SAGPHLPLK

SEQ ID NO: 10510 - protein, 9 aa, synthetic construct
SAGVEQLMY

SEQ ID NO: 10511 - protein, 9 aa, synthetic construct
SAHSHFISL

SEQ ID NO: 10512 - protein, 11 aa, synthetic construct
SAKEALETDLY

SEQ ID NO: 10513 - protein, 8 aa, synthetic construct
SAKLVSVL

SEQ ID NO: 10514 - protein, 11 aa, synthetic construct
SAKSRTIGIIG

SEQ ID NO: 10515 - protein, 10 aa, synthetic construct
SALDRCYSVY

SEQ ID NO: 10516 - protein, 9 aa, synthetic construct
SALEHSIQY

SEQ ID NO: 10517 - protein, 9 aa, synthetic construct
SALPAVTEM

SEQ ID NO: 10518 - protein, 8 aa, synthetic construct
SALPIIQK

SEQ ID NO: 10519 - protein, 10 aa, synthetic construct
SALQLEAITY

SEQ ID NO: 10520 - protein, 9 aa, synthetic construct
SALRAFESY

SEQ ID NO: 10521 - protein, 9 aa, synthetic construct
SANFSYNAL

SEQ ID NO: 10522 - protein, 9 aa, synthetic construct
SANGAILAY

SEQ ID NO: 10523 - protein, 9 aa, synthetic construct
SANIIFHTK

SEQ ID NO: 10524 - protein, 8 aa, synthetic construct
SAPAVLEI

SEQ ID NO: 10525 - protein, 9 aa, synthetic construct
SAPDICSNL

SEQ ID NO: 10526 - protein, 9 aa, synthetic construct
SAPGQGGIL

SEQ ID NO: 10527 - protein, 9 aa, synthetic construct
SAPLGKMSL

SEQ ID NO: 10528 - protein, 9 aa, synthetic construct
SAPLPQSTL

SEQ ID NO: 10529 - protein, 9 aa, synthetic construct
SAPSRIINL

SEQ ID NO: 10530 - protein, 9 aa, synthetic construct
SAPTPIQAL

SEQ ID NO: 10531 - protein, 11 aa, synthetic construct
SAQGSDVSLTA

SEQ ID NO: 10532 - protein, 9 aa, synthetic construct
SAQSFFENK

SEQ ID NO: 10533 - protein, 9 aa, synthetic construct
SAVAVALMY

SEQ ID NO: 10534 - protein, 9 aa, synthetic construct
SAVDLSTCF

SEQ ID NO: 10535 - protein, 10 aa, synthetic construct
SAVEFRQTGY

SEQ ID NO: 10536 - protein, 10 aa, synthetic construct
SAVNVGVTAY

SEQ ID NO: 10537 - protein, 9 aa, synthetic construct
SAVPFLILV

SEQ ID NO: 10538 - protein, 11 aa, synthetic construct
SAYDGKDYIAL

SEQ ID NO: 10539 - protein, 9 aa, synthetic construct
SAYGPGLVY

SEQ ID NO: 10540 - protein, 9 aa, synthetic construct
SAYPLSVEW

SEQ ID NO: 10541 - protein, 9 aa, synthetic construct
SAMEVVPAL

SEQ ID NO: 10542 - protein, 9 aa, synthetic construct
SCLDHVISY

SEQ ID NO: 10543 - protein, 9 aa, synthetic construct
SCLNLQEQY

SEQ ID NO: 10544 - protein, 9 aa, synthetic construct
SCPSSIITL

SEQ ID NO: 10545 - protein, 8 aa, synthetic construct
SCRQFSSS

SEQ ID NO: 10546 - protein, 10 aa, synthetic construct
SCRQFSSSYL

SEQ ID NO: 10547 - protein, 8 aa, synthetic construct
SDEAGEKE

SEQ ID NO: 10548 - protein, 8 aa, synthetic construct
SDKYGLGY

SEQ ID NO: 10549 - protein, 10 aa, synthetic construct
SDLDGHPVPK

SEQ ID NO: 10550 - protein, 10 aa, synthetic construct
SDLELHPPSY

SEQ ID NO: 10551 - protein, 8 aa, synthetic construct
SDLFQEDL

SEQ ID NO: 10552 - protein, 11 aa, synthetic construct
SDTEKELQALY

SEQ ID NO: 10553 - protein, 8 aa, synthetic construct
SDVEVNEK

SEQ ID NO: 10554 - protein, 8 aa, synthetic construct
SDYLHPQY

SEQ ID NO: 10555 - protein, 9 aa, synthetic construct
SEAFSVASA

SEQ ID NO: 10556 - protein, 10 aa, synthetic construct
SEAGSHTLQW

SEQ ID NO: 10557 - protein, 10 aa, synthetic construct
SEALALTQTW

SEQ ID NO: 10558 - protein, 10 aa, synthetic construct
SEALPSDIAA

SEQ ID NO: 10559 - protein, 9 aa, synthetic construct
SECEVKCMP

SEQ ID NO: 10560 - protein, 9 aa, synthetic construct
SEDEVKLAL

SEQ ID NO: 10561 - protein, 9 aa, synthetic construct
SEDGKIHVW

SEQ ID NO: 10562 - protein, 9 aa, synthetic construct
SEDGTVRIW

SEQ ID NO: 10563 - protein, 9 aa, synthetic construct
SEDKKNIIL

SEQ ID NO: 10564 - protein, 9 aa, synthetic construct
SEDNIMQVW

SEQ ID NO: 10565 - protein, 9 aa, synthetic construct
SEDTTVCVL

SEQ ID NO: 10566 - protein, 10 aa, synthetic construct
SEDMGVVVSL

SEQ ID NO: 10567 - protein, 9 aa, synthetic construct
SEENITIKL

SEQ ID NO: 10568 - protein, 9 aa, synthetic construct
SEEQLIAAK

SEQ ID NO: 10569 - protein, 9 aa, synthetic construct
SEFCFILKV

SEQ ID NO: 10570 - protein, 9 aa, synthetic construct
SEFDFFERL

SEQ ID NO: 10571 - protein, 11 aa, synthetic construct
SEFDPPGPNVA

SEQ ID NO: 10572 - protein, 9 aa, synthetic construct
SEFDSFSQV

SEQ ID NO: 10573 - protein, 9 aa, synthetic construct
SEFEGFEYI

SEQ ID NO: 10574 - protein, 9 aa, synthetic construct
SEFKRWVPT

SEQ ID NO: 10575 - protein, 10 aa, synthetic construct
SEFLNKMTEA

SEQ ID NO: 10576 - protein, 9 aa, synthetic construct
SEFLSLLGD

SEQ ID NO: 10577 - protein, 10 aa, synthetic construct
SEFQPSFHQA

SEQ ID NO: 10578 - protein, 10 aa, synthetic construct
SEFSGDVDSL

SEQ ID NO: 10579 - protein, 9 aa, synthetic construct
SEFYGFSEF

SEQ ID NO: 10580 - protein, 9 aa, synthetic construct
SEFYKHIVL

SEQ ID NO: 10581 - protein, 9 aa, synthetic construct
SEHCFDLIF

SEQ ID NO: 10582 - protein, 10 aa, synthetic construct
SEHCFDLIFA

SEQ ID NO: 10583 - protein, 10 aa, synthetic construct
SEHPGLSIGD

SEQ ID NO: 10584 - protein, 9 aa, synthetic construct
SEIEYYAML

SEQ ID NO: 10585 - protein, 9 aa, synthetic construct
SEIFHSQSF

SEQ ID NO: 10586 - protein, 10 aa, synthetic construct
SEIKGEVLYL

SEQ ID NO: 10587 - protein, 9 aa, synthetic construct
SEILTVESA

SEQ ID NO: 10588 - protein, 11 aa, synthetic construct
SEIQASEVLVA

SEQ ID NO: 10589 - protein, 9 aa, synthetic construct
SEKEFHVLP

SEQ ID NO: 10590 - protein, 9 aa, synthetic construct
SELACIYSA

SEQ ID NO: 10591 - protein, 9 aa, synthetic construct
SELAFPITA

SEQ ID NO: 10592 - protein, 9 aa, synthetic construct
SELELVTSA

SEQ ID NO: 10593 - protein, 9 aa, synthetic construct
SELEQYFTA

SEQ ID NO: 10594 - protein, 9 aa, synthetic construct
SELQQLGLP

SEQ ID NO: 10595 - protein, 9 aa, synthetic construct
SELTPMLAA

SEQ ID NO: 10596 - protein, 9 aa, synthetic construct
SENDVIRLI

SEQ ID NO: 10597 - protein, 9 aa, synthetic construct
SENFFFIEV

SEQ ID NO: 10598 - protein, 9 aa, synthetic construct
SEQPTLVTA

SEQ ID NO: 10599 - protein, 11 aa, synthetic construct
SEQRDYIDTTW

SEQ ID NO: 10600 - protein, 9 aa, synthetic construct
SERLQFETA

SEQ ID NO: 10601 - protein, 9 aa, synthetic construct
SESDLNHSF

SEQ ID NO: 10602 - protein, 9 aa, synthetic construct
SESKNYIAL

SEQ ID NO: 10603 - protein, 9 aa, synthetic construct
SESLPVETL

SEQ ID NO: 10604 - protein, 9 aa, synthetic construct
SESLVHESW

SEQ ID NO: 10605 - protein, 9 aa, synthetic construct
SESPIVVVL

SEQ ID NO: 10606 - protein, 9 aa, synthetic construct
SESQLELNW

SEQ ID NO: 10607 - protein, 9 aa, synthetic construct
SESTFMPVA

SEQ ID NO: 10608 - protein, 9 aa, synthetic construct
SESVPVIAA

SEQ ID NO: 10609 - protein, 9 aa, synthetic construct
SETDFKVMA

SEQ ID NO: 10610 - protein, 9 aa, synthetic construct
SEVCKFLSA

SEQ ID NO: 10611 - protein, 9 aa, synthetic construct
SEVDLTRSF

SEQ ID NO: 10612 - protein, 9 aa, synthetic construct
SEVELMKVA

SEQ ID NO: 10613 - protein, 9 aa, synthetic construct
SEVGKLLSA

SEQ ID NO: 10614 - protein, 9 aa, synthetic construct
SEVLLRHIA

SEQ ID NO: 10615 - protein, 10 aa, synthetic construct
SEVPVSLKEA

SEQ ID NO: 10616 - protein, 9 aa, synthetic construct
SEVQYIQEA

SEQ ID NO: 10617 - protein, 10 aa, synthetic construct
SEVTFALHSA

SEQ ID NO: 10618 - protein, 10 aa, synthetic construct
SEYHDIMYPA

SEQ ID NO: 10619 - protein, 9 aa, synthetic construct
SEYNAFWKC

SEQ ID NO: 10620 - protein, 9 aa, synthetic construct
SEYQWITSP

SEQ ID NO: 10621 - protein, 10 aa, synthetic construct
SEYVLLFGTA

SEQ ID NO: 10622 - protein, 9 aa, synthetic construct
SEMDTSVKF

SEQ ID NO: 10623 - protein, 10 aa, synthetic construct
SEMHSFIQIK

SEQ ID NO: 10624 - protein, 9 aa, synthetic construct
SFDAVLEAL

SEQ ID NO: 10625 - protein, 9 aa, synthetic construct
SFDCIQQTF

SEQ ID NO: 10626 - protein, 9 aa, synthetic construct
SFDDTNEKF

SEQ ID NO: 10627 - protein, 9 aa, synthetic construct
SFDETCTRF

SEQ ID NO: 10628 - protein, 9 aa, synthetic construct
SFDEYSSEL

SEQ ID NO: 10629 - protein, 8 aa, synthetic construct
SFDGIIAM

SEQ ID NO: 10630 - protein, 9 aa, synthetic construct
SFDGIIAMM

SEQ ID NO: 10631 - protein, 8 aa, synthetic construct
SFDITGRF

SEQ ID NO: 10632 - protein, 9 aa, synthetic construct
SFDITGRFL

SEQ ID NO: 10633 - protein, 9 aa, synthetic construct
SFDLGRQFL

SEQ ID NO: 10634 - protein, 9 aa, synthetic construct
SFDLLVKNL

SEQ ID NO: 10635 - protein, 8 aa, synthetic construct
SFDSTVRL

SEQ ID NO: 10636 - protein, 9 aa, synthetic construct
SFDTGFTSF

SEQ ID NO: 10637 - protein, 8 aa, synthetic construct
SFDVVHVK

SEQ ID NO: 10638 - protein, 9 aa, synthetic construct
SFDYAASIL

SEQ ID NO: 10639 - protein, 9 aa, synthetic construct
SFGAGGGFG

SEQ ID NO: 10640 - protein, 11 aa, synthetic construct
SFGAGGGFGSR

SEQ ID NO: 10641 - protein, 8 aa, synthetic construct
SFGGGSFG

SEQ ID NO: 10642 - protein, 9 aa, synthetic construct
SFGGGSFGG

SEQ ID NO: 10643 - protein, 10 aa, synthetic construct
SFGGGSFGGG

SEQ ID NO: 10644 - protein, 8 aa, synthetic construct
SFGGGSGF

SEQ ID NO: 10645 - protein, 8 aa, synthetic construct
SFGPHAGK

SEQ ID NO: 10646 - protein, 9 aa, synthetic construct
SFHLPINSR

SEQ ID NO: 10647 - protein, 9 aa, synthetic construct
SFHNIHNTF

SEQ ID NO: 10648 - protein, 8 aa, synthetic construct
SFIKVSHV

SEQ ID NO: 10649 - protein, 10 aa, synthetic construct
SFIVSLAAAD

SEQ ID NO: 10650 - protein, 9 aa, synthetic construct
SFLEIISSI

SEQ ID NO: 10651 - protein, 8 aa, synthetic construct
SFPVILSI

SEQ ID NO: 10652 - protein, 10 aa, synthetic construct
SFRGNKIVLK

SEQ ID NO: 10653 - protein, 8 aa, synthetic construct
SFRKKYEL

SEQ ID NO: 10654 - protein, 11 aa, synthetic construct
SFSIASDPASS

SEQ ID NO: 10655 - protein, 9 aa, synthetic construct
SFSPGNSSL

SEQ ID NO: 10656 - protein, 9 aa, synthetic construct
SFVNDIFER

SEQ ID NO: 10657 - protein, 8 aa, synthetic construct
SFYKIRTI

SEQ ID NO: 10658 - protein, 9 aa, synthetic construct
SFYPSLTVV

SEQ ID NO: 10659 - protein, 8 aa, synthetic construct
SGAHPSVR

SEQ ID NO: 10660 - protein, 9 aa, synthetic construct
SGAYPQKPL

SEQ ID NO: 10661 - protein, 10 aa, synthetic construct
SGFDGTVQVY

SEQ ID NO: 10662 - protein, 9 aa, synthetic construct
SGFGSYGSG

SEQ ID NO: 10663 - protein, 9 aa, synthetic construct
SGGFSGGSF

SEQ ID NO: 10664 - protein, 10 aa, synthetic construct
SGGLEVLAEK

SEQ ID NO: 10665 - protein, 10 aa, synthetic construct
SGGYGGLGGF

SEQ ID NO: 10666 - protein, 9 aa, synthetic construct
SGIQVRYLK

SEQ ID NO: 10667 - protein, 8 aa, synthetic construct
SGKLKLSL

SEQ ID NO: 10668 - protein, 9 aa, synthetic construct
SGLIYEETR

SEQ ID NO: 10669 - protein, 8 aa, synthetic construct
SGPEYASF

SEQ ID NO: 10670 - protein, 11 aa, synthetic construct
SGPFGQLFRPD

SEQ ID NO: 10671 - protein, 10 aa, synthetic construct
SGPGGVVACL

SEQ ID NO: 10672 - protein, 10 aa, synthetic construct
SGPPVSELIT

SEQ ID NO: 10673 - protein, 9 aa, synthetic construct
SGRTFLHTV

SEQ ID NO: 10674 - protein, 10 aa, synthetic construct
SGMGTLLISK

SEQ ID NO: 10675 - protein, 11 aa, synthetic construct
SGMNVAGVSLK

SEQ ID NO: 10676 - protein, 8 aa, synthetic construct
SIDRLRVL

SEQ ID NO: 10677 - protein, 9 aa, synthetic construct
SIFKQPVTK

SEQ ID NO: 10678 - protein, 10 aa, synthetic construct
SIFVPPFISK

SEQ ID NO: 10679 - protein, 9 aa, synthetic construct
SIIAYLQKK

SEQ ID NO: 10680 - protein, 9 aa, synthetic construct
SIIDWLNSV

SEQ ID NO: 10681 - protein, 9 aa, synthetic construct
SIIGRLLEV

SEQ ID NO: 10682 - protein, 9 aa, synthetic construct
SIIPPLFTV

SEQ ID NO: 10683 - protein, 9 aa, synthetic construct
SIKKLITSM

SEQ ID NO: 10684 - protein, 9 aa, synthetic construct
SILDDVAMV

SEQ ID NO: 10685 - protein, 9 aa, synthetic construct
SILEDPPSI

SEQ ID NO: 10686 - protein, 11 aa, synthetic construct
SILFYGRFSSP

SEQ ID NO: 10687 - protein, 9 aa, synthetic construct
SILPAIFQK

SEQ ID NO: 10688 - protein, 10 aa, synthetic construct
SILRNPVTNK

SEQ ID NO: 10689 - protein, 10 aa, synthetic construct
SILSVLKGLT

SEQ ID NO: 10690 - protein, 9 aa, synthetic construct
SINAQRNAL

SEQ ID NO: 10691 - protein, 9 aa, synthetic construct
SINGAITQF

SEQ ID NO: 10692 - protein, 9 aa, synthetic construct
SINGDLMEL

SEQ ID NO: 10693 - protein, 10 aa, synthetic construct
SIPVAPTPPR

SEQ ID NO: 10694 - protein, 8 aa, synthetic construct
SIPVGISL

SEQ ID NO: 10695 - protein, 9 aa, synthetic construct
SIREAGGAF

SEQ ID NO: 10696 - protein, 9 aa, synthetic construct
SISAVVMSY

SEQ ID NO: 10697 - protein, 9 aa, synthetic construct
SISGVTAAY

SEQ ID NO: 10698 - protein, 9 aa, synthetic construct
SISPIVLYL

SEQ ID NO: 10699 - protein, 9 aa, synthetic construct
SISSPVLSL

SEQ ID NO: 10700 - protein, 9 aa, synthetic construct
SIWDETLYK

SEQ ID NO: 10701 - protein, 9 aa, synthetic construct
SIWSHQMYY

SEQ ID NO: 10702 - protein, 10 aa, synthetic construct
SIYGGFLLGV

SEQ ID NO: 10703 - protein, 9 aa, synthetic construct
SIYPSPTGV

SEQ ID NO: 10704 - protein, 9 aa, synthetic construct
SIYVYKVLK

SEQ ID NO: 10705 - protein, 8 aa, synthetic construct
SKGFDVFN

SEQ ID NO: 10706 - protein, 10 aa, synthetic construct
SLADAINTEF

SEQ ID NO: 10707 - protein, 10 aa, synthetic construct
SLADIVLWGA

SEQ ID NO: 10708 - protein, 10 aa, synthetic construct
SLADLQNDEV

SEQ ID NO: 10709 - protein, 9 aa, synthetic construct
SLAEFVQSL

SEQ ID NO: 10710 - protein, 9 aa, synthetic construct
SLAEVLQQL

SEQ ID NO: 10711 - protein, 9 aa, synthetic construct
SLAGGIIGV

SEQ ID NO: 10712 - protein, 11 aa, synthetic construct
SLAGIGEVLGK

SEQ ID NO: 10713 - protein, 9 aa, synthetic construct
SLAQYLINA

SEQ ID NO: 10714 - protein, 9 aa, synthetic construct
SLAQYLINV

SEQ ID NO: 10715 - protein, 9 aa, synthetic construct
SLASLLVSV

SEQ ID NO: 10716 - protein, 9 aa, synthetic construct
SLDAKEIYL

SEQ ID NO: 10717 - protein, 9 aa, synthetic construct
SLDDLLTNV

SEQ ID NO: 10718 - protein, 9 aa, synthetic construct
SLDEAQFVL

SEQ ID NO: 10719 - protein, 9 aa, synthetic construct
SLDPTLPSV

SEQ ID NO: 10720 - protein, 10 aa, synthetic construct
SLEASLAETE

SEQ ID NO: 10721 - protein, 9 aa, synthetic construct
SLEELLHYV

SEQ ID NO: 10722 - protein, 10 aa, synthetic construct
SLFAGGMLRV

SEQ ID NO: 10723 - protein, 9 aa, synthetic construct
SLFDWNVKL

SEQ ID NO: 10724 - protein, 9 aa, synthetic construct
SLFEEMLQV

SEQ ID NO: 10725 - protein, 9 aa, synthetic construct
SLFEGTWYL

SEQ ID NO: 10726 - protein, 9 aa, synthetic construct
SLFERLVVL

SEQ ID NO: 10727 - protein, 9 aa, synthetic construct
SLFGGSVKL

SEQ ID NO: 10728 - protein, 9 aa, synthetic construct
SLFKRLYSL

SEQ ID NO: 10729 - protein, 9 aa, synthetic construct
SLFPGKLEV

SEQ ID NO: 10730 - protein, 10 aa, synthetic construct
SLFPGKLEVV

SEQ ID NO: 10731 - protein, 9 aa, synthetic construct
SLFPKALQR

SEQ ID NO: 10732 - protein, 10 aa, synthetic construct
SLGGGFGGGS

SEQ ID NO: 10733 - protein, 11 aa, synthetic construct
SLGGGFGGGSR

SEQ ID NO: 10734 - protein, 9 aa, synthetic construct
SLGGGFSSG

SEQ ID NO: 10735 - protein, 9 aa, synthetic construct
SLHSKLFRV

SEQ ID NO: 10736 - protein, 9 aa, synthetic construct
SLIEQTTAL

SEQ ID NO: 10737 - protein, 9 aa, synthetic construct
SLIKQIPRI

SEQ ID NO: 10738 - protein, 9 aa, synthetic construct
SLIPIISGV

SEQ ID NO: 10739 - protein, 9 aa, synthetic construct
SLIRNLEQL

SEQ ID NO: 10740 - protein, 9 aa, synthetic construct
SLISTILEV

SEQ ID NO: 10741 - protein, 9 aa, synthetic construct
SLKEKIYRL

SEQ ID NO: 10742 - protein, 9 aa, synthetic construct
SLKERFAFL

SEQ ID NO: 10743 - protein, 9 aa, synthetic construct
SLKIKGEEL

SEQ ID NO: 10744 - protein, 9 aa, synthetic construct
SLKNRFIVL

SEQ ID NO: 10745 - protein, 9 aa, synthetic construct
SLKSKVLSV

SEQ ID NO: 10746 - protein, 9 aa, synthetic construct
SLLAPSQGA

SEQ ID NO: 10747 - protein, 9 aa, synthetic construct
SLLDEFYKL

SEQ ID NO: 10748 - protein, 9 aa, synthetic construct
SLLDPLWTL

SEQ ID NO: 10749 - protein, 10 aa, synthetic construct
SLLDRFLATV

SEQ ID NO: 10750 - protein, 9 aa, synthetic construct
SLLEKSLGL

SEQ ID NO: 10751 - protein, 9 aa, synthetic construct
SLLENLEKI

SEQ ID NO: 10752 - protein, 9 aa, synthetic construct
SLLEPFVYL

SEQ ID NO: 10753 - protein, 11 aa, synthetic construct
SLLESNKDLLL

SEQ ID NO: 10754 - protein, 9 aa, synthetic construct
SLLGFVYKL

SEQ ID NO: 10755 - protein, 9 aa, synthetic construct
SLLGYFPNK

SEQ ID NO: 10756 - protein, 9 aa, synthetic construct
SLLHTLYGR

SEQ ID NO: 10757 - protein, 9 aa, synthetic construct
SLLPAIVEL

SEQ ID NO: 10758 - protein, 9 aa, synthetic construct
SLLPSVPAL

SEQ ID NO: 10759 - protein, 9 aa, synthetic construct
SLLPYLPML

SEQ ID NO: 10760 - protein, 9 aa, synthetic construct
SLLQPLNVE

SEQ ID NO: 10761 - protein, 9 aa, synthetic construct
SLLSNLDEV

SEQ ID NO: 10762 - protein, 9 aa, synthetic construct
SLMHSFILK

SEQ ID NO: 10763 - protein, 11 aa, synthetic construct
SLNTDDPLIFK

SEQ ID NO: 10764 - protein, 10 aa, synthetic construct
SLPALPLAEL

SEQ ID NO: 10765 - protein, 9 aa, synthetic construct
SLPDFCHKF

SEQ ID NO: 10766 - protein, 9 aa, synthetic construct
SLPENYKQL

SEQ ID NO: 10767 - protein, 10 aa, synthetic construct
SLPLPNFSSL

SEQ ID NO: 10768 - protein, 8 aa, synthetic construct
SLPLVLYI

SEQ ID NO: 10769 - protein, 9 aa, synthetic construct
SLPNVFSAL

SEQ ID NO: 10770 - protein, 9 aa, synthetic construct
SLPRFPSVS

SEQ ID NO: 10771 - protein, 10 aa, synthetic construct
SLPRFPSVSL

SEQ ID NO: 10772 - protein, 9 aa, synthetic construct
SLPSMIRKI

SEQ ID NO: 10773 - protein, 10 aa, synthetic construct
SLPSRKLVAL

SEQ ID NO: 10774 - protein, 9 aa, synthetic construct
SLQEEIAFL

SEQ ID NO: 10775 - protein, 9 aa, synthetic construct
SLQEGSYLL

SEQ ID NO: 10776 - protein, 9 aa, synthetic construct
SLQETIQSL

SEQ ID NO: 10777 - protein, 9 aa, synthetic construct
SLQSTILGV

SEQ ID NO: 10778 - protein, 9 aa, synthetic construct
SLSDLLVSL

SEQ ID NO: 10779 - protein, 10 aa, synthetic construct
SLSSADLSSL

SEQ ID NO: 10780 - protein, 10 aa, synthetic construct
SLTEELAYLK

SEQ ID NO: 10781 - protein, 9 aa, synthetic construct
SLVDTVYAL

SEQ ID NO: 10782 - protein, 9 aa, synthetic construct
SLVEIILHV

SEQ ID NO: 10783 - protein, 9 aa, synthetic construct
SLVKSTSQL

SEQ ID NO: 10784 - protein, 8 aa, synthetic construct
SLVNLGGS

SEQ ID NO: 10785 - protein, 10 aa, synthetic construct
SLVNLGGSKS

SEQ ID NO: 10786 - protein, 9 aa, synthetic construct
SLWGQPAEA

SEQ ID NO: 10787 - protein, 9 aa, synthetic construct
SLYDDLQVV

SEQ ID NO: 10788 - protein, 9 aa, synthetic construct
SLYDYNPNL

SEQ ID NO: 10789 - protein, 9 aa, synthetic construct
SLYEMVSRV

SEQ ID NO: 10790 - protein, 9 aa, synthetic construct
SLYGGNAVV

SEQ ID NO: 10791 - protein, 9 aa, synthetic construct
SLYHRVLLY

SEQ ID NO: 10792 - protein, 9 aa, synthetic construct
SLYPIAVLI

SEQ ID NO: 10793 - protein, 10 aa, synthetic construct
SLYQSKYEEL

SEQ ID NO: 10794 - protein, 9 aa, synthetic construct
SLMLVTVEL

SEQ ID NO: 10795 - protein, 9 aa, synthetic construct
SLMPWFHGK

SEQ ID NO: 10796 - protein, 9 aa, synthetic construct
SMDPLPVFL

SEQ ID NO: 10797 - protein, 8 aa, synthetic construct
SMVESPLI

SEQ ID NO: 10798 - protein, 8 aa, synthetic construct
SNIVIPLI

SEQ ID NO: 10799 - protein, 8 aa, synthetic construct
SNKLHFAF

SEQ ID NO: 10800 - protein, 10 aa, synthetic construct
SNKSDYDKIS

SEQ ID NO: 10801 - protein, 9 aa, synthetic construct
SPAAATTVL

SEQ ID NO: 10802 - protein, 10 aa, synthetic construct
SPADDLGQTY

SEQ ID NO: 10803 - protein, 9 aa, synthetic construct
SPAEKAGLL

SEQ ID NO: 10804 - protein, 11 aa, synthetic construct
SPAEPSVYATL

SEQ ID NO: 10805 - protein, 9 aa, synthetic construct
SPAEWGQRL

SEQ ID NO: 10806 - protein, 9 aa, synthetic construct
SPAFSTRVL

SEQ ID NO: 10807 - protein, 9 aa, synthetic construct
SPAGLKAVL

SEQ ID NO: 10808 - protein, 9 aa, synthetic construct
SPAGPILSI

SEQ ID NO: 10809 - protein, 9 aa, synthetic construct
SPAGVSATL

SEQ ID NO: 10810 - protein, 9 aa, synthetic construct
SPALGLRGL

SEQ ID NO: 10811 - protein, 9 aa, synthetic construct
SPALKTTRL

SEQ ID NO: 10812 - protein, 9 aa, synthetic construct
SPALPGLKL

SEQ ID NO: 10813 - protein, 9 aa, synthetic construct
SPALPSGSL

SEQ ID NO: 10814 - protein, 9 aa, synthetic construct
SPANPAHIL

SEQ ID NO: 10815 - protein, 9 aa, synthetic construct
SPAPVPVTY

SEQ ID NO: 10816 - protein, 10 aa, synthetic construct
SPAQVSGASF

SEQ ID NO: 10817 - protein, 9 aa, synthetic construct
SPAQYQVVL

SEQ ID NO: 10818 - protein, 9 aa, synthetic construct
SPARPPFSF

SEQ ID NO: 10819 - protein, 10 aa, synthetic construct
SPASDTYIVF

SEQ ID NO: 10820 - protein, 9 aa, synthetic construct
SPASPKISL

SEQ ID NO: 10821 - protein, 11 aa, synthetic construct
SPAVERLISSL

SEQ ID NO: 10822 - protein, 8 aa, synthetic construct
SPAVKRLL

SEQ ID NO: 10823 - protein, 9 aa, synthetic construct
SPAYRDLAA

SEQ ID NO: 10824 - protein, 9 aa, synthetic construct
SPACTFIEL

SEQ ID NO: 10825 - protein, 10 aa, synthetic construct
SPCCIVTSTY

SEQ ID NO: 10826 - protein, 9 aa, synthetic construct
SPDAQVPVF

SEQ ID NO: 10827 - protein, 11 aa, synthetic construct
SPDCGGSIEVM

SEQ ID NO: 10828 - protein, 9 aa, synthetic construct
SPDEAALVY

SEQ ID NO: 10829 - protein, 10 aa, synthetic construct
SPDKIPWSAL

SEQ ID NO: 10830 - protein, 9 aa, synthetic construct
SPDLRLTWL

SEQ ID NO: 10831 - protein, 11 aa, synthetic construct
SPDPHKGLVLL

SEQ ID NO: 10832 - protein, 11 aa, synthetic construct
SPDTANDGFVR

SEQ ID NO: 10833 - protein, 10 aa, synthetic construct
SPEASLRAVL

SEQ ID NO: 10834 - protein, 9 aa, synthetic construct
SPEELRLEY

SEQ ID NO: 10835 - protein, 11 aa, synthetic construct
SPEGRLFQVEY

SEQ ID NO: 10836 - protein, 11 aa, synthetic construct
SPEGRLYQVEY

SEQ ID NO: 10837 - protein, 9 aa, synthetic construct
SPEVGRLSL

SEQ ID NO: 10838 - protein, 9 aa, synthetic construct
SPFARGNVF

SEQ ID NO: 10839 - protein, 9 aa, synthetic construct
SPFEFGFTF

SEQ ID NO: 10840 - protein, 9 aa, synthetic construct
SPFFERSGL

SEQ ID NO: 10841 - protein, 11 aa, synthetic construct
SPFFERSGLAY

SEQ ID NO: 10842 - protein, 9 aa, synthetic construct
SPFFLAVGY

SEQ ID NO: 10843 - protein, 8 aa, synthetic construct
SPFFREAL

SEQ ID NO: 10844 - protein, 9 aa, synthetic construct
SPFFREALL

SEQ ID NO: 10845 - protein, 9 aa, synthetic construct
SPFGDSPLF

SEQ ID NO: 10846 - protein, 9 aa, synthetic construct
SPFHRNLFL

SEQ ID NO: 10847 - protein, 9 aa, synthetic construct
SPFKRQLSL

SEQ ID NO: 10848 - protein, 8 aa, synthetic construct
SPFLRIGL

SEQ ID NO: 10849 - protein, 9 aa, synthetic construct
SPFPSRVFM

SEQ ID NO: 10850 - protein, 11 aa, synthetic construct
SPFQDQLHQLY

SEQ ID NO: 10851 - protein, 9 aa, synthetic construct
SPFSFHHVL

SEQ ID NO: 10852 - protein, 9 aa, synthetic construct
SPGLPSTTF

SEQ ID NO: 10853 - protein, 9 aa, synthetic construct
SPGLRDVAL

SEQ ID NO: 10854 - protein, 10 aa, synthetic construct
SPGQHYFSSL

SEQ ID NO: 10855 - protein, 9 aa, synthetic construct
SPGQRSISL

SEQ ID NO: 10856 - protein, 9 aa, synthetic construct
SPGSPSLGL

SEQ ID NO: 10857 - protein, 9 aa, synthetic construct
SPGVGKTSL

SEQ ID NO: 10858 - protein, 9 aa, synthetic construct
SPGWVRLAL

SEQ ID NO: 10859 - protein, 9 aa, synthetic construct
SPHGHILVL

SEQ ID NO: 10860 - protein, 9 aa, synthetic construct
SPHLLANSK

SEQ ID NO: 10861 - protein, 9 aa, synthetic construct
SPHPAATAL

SEQ ID NO: 10862 - protein, 10 aa, synthetic construct
SPHPGLLLDL

SEQ ID NO: 10863 - protein, 9 aa, synthetic construct
SPIEKSGVL

SEQ ID NO: 10864 - protein, 10 aa, synthetic construct
SPIGVSSTSF

SEQ ID NO: 10865 - protein, 10 aa, synthetic construct
SPIKVTLATL

SEQ ID NO: 10866 - protein, 9 aa, synthetic construct
SPILVATAV

SEQ ID NO: 10867 - protein, 9 aa, synthetic construct
SPINRIVQI

SEQ ID NO: 10868 - protein, 9 aa, synthetic construct
SPIPHDPEF

SEQ ID NO: 10869 - protein, 10 aa, synthetic construct
SPIQVGGHVL

SEQ ID NO: 10870 - protein, 10 aa, synthetic construct
SPIRREKLAL

SEQ ID NO: 10871 - protein, 9 aa, synthetic construct
SPISSDQSL

SEQ ID NO: 10872 - protein, 9 aa, synthetic construct
SPITARDAL

SEQ ID NO: 10873 - protein, 10 aa, synthetic construct
SPIVTSGLIM

SEQ ID NO: 10874 - protein, 9 aa, synthetic construct
SPKFSELVM

SEQ ID NO: 10875 - protein, 9 aa, synthetic construct
SPKGHLTRL

SEQ ID NO: 10876 - protein, 9 aa, synthetic construct
SPKGRFVML

SEQ ID NO: 10877 - protein, 9 aa, synthetic construct
SPKIKSLAI

SEQ ID NO: 10878 - protein, 9 aa, synthetic construct
SPKNVGPFL

SEQ ID NO: 10879 - protein, 9 aa, synthetic construct
SPKPPTSMF

SEQ ID NO: 10880 - protein, 9 aa, synthetic construct
SPKPMVSLL

SEQ ID NO: 10881 - protein, 9 aa, synthetic construct
SPKRDLIAL

SEQ ID NO: 10882 - protein, 8 aa, synthetic construct
SPKVRLSL

SEQ ID NO: 10883 - protein, 9 aa, synthetic construct
SPLGLRRIL

SEQ ID NO: 10884 - protein, 11 aa, synthetic construct
SPLGMPDPHLY

SEQ ID NO: 10885 - protein, 8 aa, synthetic construct
SPLLKSEL

SEQ ID NO: 10886 - protein, 9 aa, synthetic construct
SPLLSVTSF

SEQ ID NO: 10887 - protein, 9 aa, synthetic construct
SPLNNKGIL

SEQ ID NO: 10888 - protein, 9 aa, synthetic construct
SPLNRAGLL

SEQ ID NO: 10889 - protein, 9 aa, synthetic construct
SPLNSSSAL

SEQ ID NO: 10890 - protein, 11 aa, synthetic construct
SPLPAHLQQAF

SEQ ID NO: 10891 - protein, 9 aa, synthetic construct
SPLPAPASL

SEQ ID NO: 10892 - protein, 9 aa, synthetic construct
SPLPAQLVY

SEQ ID NO: 10893 - protein, 9 aa, synthetic construct
SPLPFQNRY

SEQ ID NO: 10894 - protein, 10 aa, synthetic construct
SPLPHVGAAL

SEQ ID NO: 10895 - protein, 9 aa, synthetic construct
SPLPQEVVM

SEQ ID NO: 10896 - protein, 9 aa, synthetic construct
SPLQASSAL

SEQ ID NO: 10897 - protein, 9 aa, synthetic construct
SPLQFYVDY

SEQ ID NO: 10898 - protein, 8 aa, synthetic construct
SPLYRDEL

SEQ ID NO: 10899 - protein, 9 aa, synthetic construct
SPNAEIHIL

SEQ ID NO: 10900 - protein, 9 aa, synthetic construct
SPNEFKVYM

SEQ ID NO: 10901 - protein, 9 aa, synthetic construct
SPNGKLRLL

SEQ ID NO: 10902 - protein, 10 aa, synthetic construct
SPNGTIRNIL

SEQ ID NO: 10903 - protein, 9 aa, synthetic construct
SPNLRLLDL

SEQ ID NO: 10904 - protein, 9 aa, synthetic construct
SPNPFVHEL

SEQ ID NO: 10905 - protein, 11 aa, synthetic construct
SPNQARAQAAL

SEQ ID NO: 10906 - protein, 9 aa, synthetic construct
SPNQKLLAV

SEQ ID NO: 10907 - protein, 10 aa, synthetic construct
SPNQSLRLGL

SEQ ID NO: 10908 - protein, 9 aa, synthetic construct
SPNSQALIL

SEQ ID NO: 10909 - protein, 9 aa, synthetic construct
SPNSRLTFE

SEQ ID NO: 10910 - protein, 9 aa, synthetic construct
SPNSYFMDV

SEQ ID NO: 10911 - protein, 10 aa, synthetic construct
SPPLVGSSAL

SEQ ID NO: 10912 - protein, 11 aa, synthetic construct
SPPNGFSNGPS

SEQ ID NO: 10913 - protein, 9 aa, synthetic construct
SPPVLSHEF

SEQ ID NO: 10914 - protein, 9 aa, synthetic construct
SPQAPTLQV

SEQ ID NO: 10915 - protein, 9 aa, synthetic construct
SPQDKRTLL

SEQ ID NO: 10916 - protein, 9 aa, synthetic construct
SPQDSRLYL

SEQ ID NO: 10917 - protein, 9 aa, synthetic construct
SPQEARNML

SEQ ID NO: 10918 - protein, 9 aa, synthetic construct
SPQGPGALF

SEQ ID NO: 10919 - protein, 9 aa, synthetic construct
SPQGRVMTI

SEQ ID NO: 10920 - protein, 9 aa, synthetic construct
SPQKTMSVL

SEQ ID NO: 10921 - protein, 9 aa, synthetic construct
SPQKVTLYL

SEQ ID NO: 10922 - protein, 9 aa, synthetic construct
SPQPRLIYL

SEQ ID NO: 10923 - protein, 10 aa, synthetic construct
SPQPSSNLSL

SEQ ID NO: 10924 - protein, 9 aa, synthetic construct
SPQQVSAQL

SEQ ID NO: 10925 - protein, 10 aa, synthetic construct
SPQSGNFRQL

SEQ ID NO: 10926 - protein, 8 aa, synthetic construct
SPQSGSIL

SEQ ID NO: 10927 - protein, 9 aa, synthetic construct
SPQSNSPVL

SEQ ID NO: 10928 - protein, 9 aa, synthetic construct
SPQSPGDAL

SEQ ID NO: 10929 - protein, 11 aa, synthetic construct
SPRAPVSPLKF

SEQ ID NO: 10930 - protein, 9 aa, synthetic construct
SPRASMGVL

SEQ ID NO: 10931 - protein, 9 aa, synthetic construct
SPRDPVLTL

SEQ ID NO: 10932 - protein, 10 aa, synthetic construct
SPRDSPAVSL

SEQ ID NO: 10933 - protein, 9 aa, synthetic construct
SPREALIRL

SEQ ID NO: 10934 - protein, 9 aa, synthetic construct
SPRFPAQYL

SEQ ID NO: 10935 - protein, 9 aa, synthetic construct
SPRGAGWLF

SEQ ID NO: 10936 - protein, 9 aa, synthetic construct
SPRGAGYLF

SEQ ID NO: 10937 - protein, 9 aa, synthetic construct
SPRGFPLGL

SEQ ID NO: 10938 - protein, 11 aa, synthetic construct
SPRGIILTDNL

SEQ ID NO: 10939 - protein, 9 aa, synthetic construct
SPRHRPALL

SEQ ID NO: 10940 - protein, 11 aa, synthetic construct
SPRIFPHLCSL

SEQ ID NO: 10941 - protein, 9 aa, synthetic construct
SPRIPPSQF

SEQ ID NO: 10942 - protein, 9 aa, synthetic construct
SPRIYSNSL

SEQ ID NO: 10943 - protein, 9 aa, synthetic construct
SPRKGWALL

SEQ ID NO: 10944 - protein, 9 aa, synthetic construct
SPRKLPTSL

SEQ ID NO: 10945 - protein, 9 aa, synthetic construct
SPRLPAREL

SEQ ID NO: 10946 - protein, 9 aa, synthetic construct
SPRLSQTFL

SEQ ID NO: 10947 - protein, 11 aa, synthetic construct
SPRLSQTFLQL

SEQ ID NO: 10948 - protein, 9 aa, synthetic construct
SPRNEVEAL

SEQ ID NO: 10949 - protein, 10 aa, synthetic construct
SPRPLSCLEL

SEQ ID NO: 10950 - protein, 10 aa, synthetic construct
SPRPNHSYIF

SEQ ID NO: 10951 - protein, 10 aa, synthetic construct
SPRPNIILGL

SEQ ID NO: 10952 - protein, 9 aa, synthetic construct
SPRPPAEGF

SEQ ID NO: 10953 - protein, 9 aa, synthetic construct
SPRPPLISV

SEQ ID NO: 10954 - protein, 9 aa, synthetic construct
SPRQALTDF

SEQ ID NO: 10955 - protein, 9 aa, synthetic construct
SPRQLFSAL

SEQ ID NO: 10956 - protein, 9 aa, synthetic construct
SPRSGLIRV

SEQ ID NO: 10957 - protein, 10 aa, synthetic construct
SPRSSDLVKL

SEQ ID NO: 10958 - protein, 10 aa, synthetic construct
SPRSSLNNSL

SEQ ID NO: 10959 - protein, 10 aa, synthetic construct
SPRSWIQVQI

SEQ ID NO: 10960 - protein, 9 aa, synthetic construct
SPRTSLTVV

SEQ ID NO: 10961 - protein, 8 aa, synthetic construct
SPRTSPVI

SEQ ID NO: 10962 - protein, 9 aa, synthetic construct
SPRVHSLIL

SEQ ID NO: 10963 - protein, 9 aa, synthetic construct
SPRVQFQSL

SEQ ID NO: 10964 - protein, 9 aa, synthetic construct
SPRVVSTSL

SEQ ID NO: 10965 - protein, 8 aa, synthetic construct
SPRWGGIM

SEQ ID NO: 10966 - protein, 11 aa, synthetic construct
SPSAAHFITRL

SEQ ID NO: 10967 - protein, 9 aa, synthetic construct
SPSASALTL

SEQ ID NO: 10968 - protein, 9 aa, synthetic construct
SPSATASIL

SEQ ID NO: 10969 - protein, 9 aa, synthetic construct
SPSATLAAL

SEQ ID NO: 10970 - protein, 9 aa, synthetic construct
SPSAYVLEI

SEQ ID NO: 10971 - protein, 9 aa, synthetic construct
SPSDRPLSL

SEQ ID NO: 10972 - protein, 9 aa, synthetic construct
SPSDSFSVL

SEQ ID NO: 10973 - protein, 9 aa, synthetic construct
SPSETVSSL

SEQ ID NO: 10974 - protein, 9 aa, synthetic construct
SPSFPRPSL

SEQ ID NO: 10975 - protein, 11 aa, synthetic construct
SPSGKLVQIEY

SEQ ID NO: 10976 - protein, 9 aa, synthetic construct
SPSKPNPVF

SEQ ID NO: 10977 - protein, 9 aa, synthetic construct
SPSNGVGSL

SEQ ID NO: 10978 - protein, 10 aa, synthetic construct
SPSNTRYLFL

SEQ ID NO: 10979 - protein, 10 aa, synthetic construct
SPSPLSGSAL

SEQ ID NO: 10980 - protein, 9 aa, synthetic construct
SPSPPSVAV

SEQ ID NO: 10981 - protein, 9 aa, synthetic construct
SPSPTGASL

SEQ ID NO: 10982 - protein, 10 aa, synthetic construct
SPSPVLRLVL

SEQ ID NO: 10983 - protein, 9 aa, synthetic construct
SPSSILSTL

SEQ ID NO: 10984 - protein, 9 aa, synthetic construct
SPSSKYVKL

SEQ ID NO: 10985 - protein, 9 aa, synthetic construct
SPSSLFESL

SEQ ID NO: 10986 - protein, 9 aa, synthetic construct
SPSSPGSSL

SEQ ID NO: 10987 - protein, 10 aa, synthetic construct
SPSSVTGNAL

SEQ ID NO: 10988 - protein, 9 aa, synthetic construct
SPSVKPNEL

SEQ ID NO: 10989 - protein, 9 aa, synthetic construct
SPSYPEISF

SEQ ID NO: 10990 - protein, 9 aa, synthetic construct
SPTCLTLIY

SEQ ID NO: 10991 - protein, 9 aa, synthetic construct
SPTENSFTL

SEQ ID NO: 10992 - protein, 10 aa, synthetic construct
SPTGGRMSVF

SEQ ID NO: 10993 - protein, 9 aa, synthetic construct
SPTLRQLDL

SEQ ID NO: 10994 - protein, 10 aa, synthetic construct
SPTPRIKAEL

SEQ ID NO: 10995 - protein, 8 aa, synthetic construct
SPTQPIQL

SEQ ID NO: 10996 - protein, 10 aa, synthetic construct
SPTSAHLLQL

SEQ ID NO: 10997 - protein, 10 aa, synthetic construct
SPTSVRQMAL

SEQ ID NO: 10998 - protein, 9 aa, synthetic construct
SPTTAFTVL

SEQ ID NO: 10999 - protein, 9 aa, synthetic construct
SPTTIQVTY

SEQ ID NO: 11000 - protein, 9 aa, synthetic construct
SPTTSFLAL

SEQ ID NO: 11001 - protein, 9 aa, synthetic construct
SPVDSPSSL

SEQ ID NO: 11002 - protein, 8 aa, synthetic construct
SPVFKTVL

SEQ ID NO: 11003 - protein, 9 aa, synthetic construct
SPVFMQPVY

SEQ ID NO: 11004 - protein, 8 aa, synthetic construct
SPVKLAQL

SEQ ID NO: 11005 - protein, 8 aa, synthetic construct
SPVLREGL

SEQ ID NO: 11006 - protein, 9 aa, synthetic construct
SPVLSLSSL

SEQ ID NO: 11007 - protein, 9 aa, synthetic construct
SPVNGKLSV

SEQ ID NO: 11008 - protein, 9 aa, synthetic construct
SPVNIHPSY

SEQ ID NO: 11009 - protein, 9 aa, synthetic construct
SPWEAFPVY

SEQ ID NO: 11010 - protein, 10 aa, synthetic construct
SPWEGAKNVY

SEQ ID NO: 11011 - protein, 9 aa, synthetic construct
SPWLLRVEL

SEQ ID NO: 11012 - protein, 10 aa, synthetic construct
SPWPDAPTAY

SEQ ID NO: 11013 - protein, 9 aa, synthetic construct
SPWSGLMAL

SEQ ID NO: 11014 - protein, 10 aa, synthetic construct
SPWTGRFYSL

SEQ ID NO: 11015 - protein, 10 aa, synthetic construct
SPYAAQPTSY

SEQ ID NO: 11016 - protein, 9 aa, synthetic construct
SPYAGAAGF

SEQ ID NO: 11017 - protein, 10 aa, synthetic construct
SPYDGLFIAL

SEQ ID NO: 11018 - protein, 9 aa, synthetic construct
SPYGQRLTL

SEQ ID NO: 11019 - protein, 9 aa, synthetic construct
SPYGSSLDL

SEQ ID NO: 11020 - protein, 9 aa, synthetic construct
SPYLRPLTL

SEQ ID NO: 11021 - protein, 9 aa, synthetic construct
SPYPEAVEL

SEQ ID NO: 11022 - protein, 11 aa, synthetic construct
SPYPGLRLISL

SEQ ID NO: 11023 - protein, 9 aa, synthetic construct
SPYQGGVFF

SEQ ID NO: 11024 - protein, 9 aa, synthetic construct
SPYQNIKIL

SEQ ID NO: 11025 - protein, 9 aa, synthetic construct
SPYSVVCKY

SEQ ID NO: 11026 - protein, 9 aa, synthetic construct
SPMALFLKM

SEQ ID NO: 11027 - protein, 9 aa, synthetic construct
SPMDIFDMF

SEQ ID NO: 11028 - protein, 10 aa, synthetic construct
SPMEGTGISL

SEQ ID NO: 11029 - protein, 10 aa, synthetic construct
SPMPGTLTAL

SEQ ID NO: 11030 - protein, 10 aa, synthetic construct
SPMPPSEVKL

SEQ ID NO: 11031 - protein, 11 aa, synthetic construct
SPMSDVVSREL

SEQ ID NO: 11032 - protein, 11 aa, synthetic construct
SPMMPRITSVF

SEQ ID NO: 11033 - protein, 8 aa, synthetic construct
SQFAFESV

SEQ ID NO: 11034 - protein, 9 aa, synthetic construct
SQFAFESVV

SEQ ID NO: 11035 - protein, 9 aa, synthetic construct
SQFDFLAVK

SEQ ID NO: 11036 - protein, 9 aa, synthetic construct
SQFDSTTGF

SEQ ID NO: 11037 - protein, 8 aa, synthetic construct
SQFEELEI

SEQ ID NO: 11038 - protein, 9 aa, synthetic construct
SQFGGGSQY

SEQ ID NO: 11039 - protein, 9 aa, synthetic construct
SQFPKHLIV

SEQ ID NO: 11040 - protein, 9 aa, synthetic construct
SQFSYQHAI

SEQ ID NO: 11041 - protein, 8 aa, synthetic construct
SQFTLQCV

SEQ ID NO: 11042 - protein, 9 aa, synthetic construct
SQHYHQGYY

SEQ ID NO: 11043 - protein, 8 aa, synthetic construct
SQIEKPKI

SEQ ID NO: 11044 - protein, 8 aa, synthetic construct
SQIFARKV

SEQ ID NO: 11045 - protein, 10 aa, synthetic construct
SQIHDIVLVG

SEQ ID NO: 11046 - protein, 11 aa, synthetic construct
SQIHDIVLVGG

SEQ ID NO: 11047 - protein, 9 aa, synthetic construct
SQILPTEEY

SEQ ID NO: 11048 - protein, 8 aa, synthetic construct
SQILVNQI

SEQ ID NO: 11049 - protein, 8 aa, synthetic construct
SQKIRYVF

SEQ ID NO: 11050 - protein, 8 aa, synthetic construct
SQKRHWTF

SEQ ID NO: 11051 - protein, 8 aa, synthetic construct
SQLAVLKV

SEQ ID NO: 11052 - protein, 9 aa, synthetic construct
SQLIIHQRI

SEQ ID NO: 11053 - protein, 8 aa, synthetic construct
SQLILQKI

SEQ ID NO: 11054 - protein, 8 aa, synthetic construct
SQLQITVI

SEQ ID NO: 11055 - protein, 8 aa, synthetic construct
SQLRVAKV

SEQ ID NO: 11056 - protein, 8 aa, synthetic construct
SQLTIKKV

SEQ ID NO: 11057 - protein, 8 aa, synthetic construct
SQMTFHKI

SEQ ID NO: 11058 - protein, 8 aa, synthetic construct
SQSLLPAI

SEQ ID NO: 11059 - protein, 8 aa, synthetic construct
SQTLLSVL

SEQ ID NO: 11060 - protein, 8 aa, synthetic construct
SQVIFNSV

SEQ ID NO: 11061 - protein, 9 aa, synthetic construct
SQWSPALTI

SEQ ID NO: 11062 - protein, 8 aa, synthetic construct
SQYFVLLI

SEQ ID NO: 11063 - protein, 9 aa, synthetic construct
SQYGEIVNI

SEQ ID NO: 11064 - protein, 8 aa, synthetic construct
SQYKQLTI

SEQ ID NO: 11065 - protein, 8 aa, synthetic construct
SQYNALNV

SEQ ID NO: 11066 - protein, 8 aa, synthetic construct
SQYPELLV

SEQ ID NO: 11067 - protein, 9 aa, synthetic construct
SQYPGAKYI

SEQ ID NO: 11068 - protein, 9 aa, synthetic construct
SQYQGVVVY

SEQ ID NO: 11069 - protein, 8 aa, synthetic construct
SQYSVLLI

SEQ ID NO: 11070 - protein, 10 aa, synthetic construct
SRADQFEYVM

SEQ ID NO: 11071 - protein, 11 aa, synthetic construct
SRAGPLSGKKF

SEQ ID NO: 11072 - protein, 9 aa, synthetic construct
SRASTLAKF

SEQ ID NO: 11073 - protein, 9 aa, synthetic construct
SRFAEALHY

SEQ ID NO: 11074 - protein, 10 aa, synthetic construct
SRFEALNLSF

SEQ ID NO: 11075 - protein, 9 aa, synthetic construct
SRFGKFIRI

SEQ ID NO: 11076 - protein, 9 aa, synthetic construct
SRFGNAFHL

SEQ ID NO: 11077 - protein, 9 aa, synthetic construct
SRFLNKQPY

SEQ ID NO: 11078 - protein, 11 aa, synthetic construct
SRFLPKPLYTR

SEQ ID NO: 11079 - protein, 11 aa, synthetic construct
SRFLPRPVFTK

SEQ ID NO: 11080 - protein, 9 aa, synthetic construct
SRFPYYNSL

SEQ ID NO: 11081 - protein, 9 aa, synthetic construct
SRFQGTLYL

SEQ ID NO: 11082 - protein, 11 aa, synthetic construct
SRFRHPNIVDF

SEQ ID NO: 11083 - protein, 9 aa, synthetic construct
SRFSGGFGA

SEQ ID NO: 11084 - protein, 9 aa, synthetic construct
SRFVHGEGL

SEQ ID NO: 11085 - protein, 9 aa, synthetic construct
SRFWYDFTL

SEQ ID NO: 11086 - protein, 9 aa, synthetic construct
SRGDFVVEY

SEQ ID NO: 11087 - protein, 9 aa, synthetic construct
SRIFILAHF

SEQ ID NO: 11088 - protein, 9 aa, synthetic construct
SRIGHIAHL

SEQ ID NO: 11089 - protein, 10 aa, synthetic construct
SRIQQIIEGK

SEQ ID NO: 11090 - protein, 11 aa, synthetic construct
SRISLADIAQK

SEQ ID NO: 11091 - protein, 9 aa, synthetic construct
SRLALLTEL

SEQ ID NO: 11092 - protein, 10 aa, synthetic construct
SRLDHPFFVK

SEQ ID NO: 11093 - protein, 9 aa, synthetic construct
SRLDQELKL

SEQ ID NO: 11094 - protein, 9 aa, synthetic construct
SRLFAVIRF

SEQ ID NO: 11095 - protein, 9 aa, synthetic construct
SRLFFVIEY

SEQ ID NO: 11096 - protein, 9 aa, synthetic construct
SRLFPNSKF

SEQ ID NO: 11097 - protein, 10 aa, synthetic construct
SRLFPPAFRR

SEQ ID NO: 11098 - protein, 11 aa, synthetic construct
SRLHVIFGGTK

SEQ ID NO: 11099 - protein, 10 aa, synthetic construct
SRLKALNATF

SEQ ID NO: 11100 - protein, 9 aa, synthetic construct
SRLKIHFTK

SEQ ID NO: 11101 - protein, 10 aa, synthetic construct
SRLKNLVLTY

SEQ ID NO: 11102 - protein, 9 aa, synthetic construct
SRLNITYPM

SEQ ID NO: 11103 - protein, 11 aa, synthetic construct
SRLNITYPMLF

SEQ ID NO: 11104 - protein, 10 aa, synthetic construct
SRLPSLGAGF

SEQ ID NO: 11105 - protein, 11 aa, synthetic construct
SRLQPKQPLRL

SEQ ID NO: 11106 - protein, 9 aa, synthetic construct
SRLVLCKTF

SEQ ID NO: 11107 - protein, 11 aa, synthetic construct
SRMDVTSCISY

SEQ ID NO: 11108 - protein, 11 aa, synthetic construct
SRNALLFNLGF

SEQ ID NO: 11109 - protein, 9 aa, synthetic construct
SRNTFDPSL

SEQ ID NO: 11110 - protein, 9 aa, synthetic construct
SRPDLILFL

SEQ ID NO: 11111 - protein, 9 aa, synthetic construct
SRPENAIIY

SEQ ID NO: 11112 - protein, 9 aa, synthetic construct
SRPESFAIY

SEQ ID NO: 11113 - protein, 9 aa, synthetic construct
SRPHFLIEL

SEQ ID NO: 11114 - protein, 9 aa, synthetic construct
SRPLLENKL

SEQ ID NO: 11115 - protein, 9 aa, synthetic construct
SRPSTYYEL

SEQ ID NO: 11116 - protein, 10 aa, synthetic construct
SRQFSSRSGY

SEQ ID NO: 11117 - protein, 9 aa, synthetic construct
SRSPKVLVL

SEQ ID NO: 11118 - protein, 11 aa, synthetic construct
SRSVALAVLAL

SEQ ID NO: 11119 - protein, 9 aa, synthetic construct
SRSVIIREL

SEQ ID NO: 11120 - protein, 9 aa, synthetic construct
SRTPYHVNL

SEQ ID NO: 11121 - protein, 9 aa, synthetic construct
SRTSVQPTF

SEQ ID NO: 11122 - protein, 9 aa, synthetic construct
SRVLIFSQM

SEQ ID NO: 11123 - protein, 9 aa, synthetic construct
SRVNHLILV

SEQ ID NO: 11124 - protein, 9 aa, synthetic construct
SRVPLFPVF

SEQ ID NO: 11125 - protein, 9 aa, synthetic construct
SSCPQQWIK

SEQ ID NO: 11126 - protein, 8 aa, synthetic construct
SSDEAVIL

SEQ ID NO: 11127 - protein, 11 aa, synthetic construct
SSDGAISLLTY

SEQ ID NO: 11128 - protein, 10 aa, synthetic construct
SSDGHEFIVK

SEQ ID NO: 11129 - protein, 11 aa, synthetic construct
SSDLDGHPVPK

SEQ ID NO: 11130 - protein, 9 aa, synthetic construct
SSDNIMVQY

SEQ ID NO: 11131 - protein, 9 aa, synthetic construct
SSDPDQLVY

SEQ ID NO: 11132 - protein, 9 aa, synthetic construct
SSDPGALMY

SEQ ID NO: 11133 - protein, 10 aa, synthetic construct
SSDSVGGFRY

SEQ ID NO: 11134 - protein, 11 aa, synthetic construct
SSDTADFRDLY

SEQ ID NO: 11135 - protein, 9 aa, synthetic construct
SSDVLVFDY

SEQ ID NO: 11136 - protein, 9 aa, synthetic construct
SSEELPLYY

SEQ ID NO: 11137 - protein, 9 aa, synthetic construct
SSELFTLTY

SEQ ID NO: 11138 - protein, 9 aa, synthetic construct
SSFDGIIAM

SEQ ID NO: 11139 - protein, 10 aa, synthetic construct
SSFDGIIAMM

SEQ ID NO: 11140 - protein, 9 aa, synthetic construct
SSFPVILSI

SEQ ID NO: 11141 - protein, 11 aa, synthetic construct
SSGFGQHGSVS

SEQ ID NO: 11142 - protein, 10 aa, synthetic construct
SSGGFSGGSF

SEQ ID NO: 11143 - protein, 10 aa, synthetic construct
SSGVDLSMAS

SEQ ID NO: 11144 - protein, 11 aa, synthetic construct
SSHGWTGPSTG

SEQ ID NO: 11145 - protein, 11 aa, synthetic construct
SSHKTFRIKRF

SEQ ID NO: 11146 - protein, 10 aa, synthetic construct
SSKGSLGGGF

SEQ ID NO: 11147 - protein, 8 aa, synthetic construct
SSLLEKGL

SEQ ID NO: 11148 - protein, 10 aa, synthetic construct
SSLLEKGLDG

SEQ ID NO: 11149 - protein, 11 aa, synthetic construct
SSLLEKGLDGA

SEQ ID NO: 11150 - protein, 9 aa, synthetic construct
SSLPKKLAL

SEQ ID NO: 11151 - protein, 9 aa, synthetic construct
SSLYIILKK

SEQ ID NO: 11152 - protein, 9 aa, synthetic construct
SSPGLFGAF

SEQ ID NO: 11153 - protein, 9 aa, synthetic construct
SSPVSMVHL

SEQ ID NO: 11154 - protein, 9 aa, synthetic construct
SSPYSPAYL

SEQ ID NO: 11155 - protein, 9 aa, synthetic construct
SSSGLNSEK

SEQ ID NO: 11156 - protein, 10 aa, synthetic construct
SSSGLNSEKV

SEQ ID NO: 11157 - protein, 11 aa, synthetic construct
SSSGLNSEKVA

SEQ ID NO: 11158 - protein, 11 aa, synthetic construct
SSSKGSLGGGF

SEQ ID NO: 11159 - protein, 9 aa, synthetic construct
SSTEGNFTK

SEQ ID NO: 11160 - protein, 11 aa, synthetic construct
SSTISSNVASK

SEQ ID NO: 11161 - protein, 8 aa, synthetic construct
SSTPLPTI

SEQ ID NO: 11162 - protein, 11 aa, synthetic construct
SSTTKGILFVK

SEQ ID NO: 11163 - protein, 10 aa, synthetic construct
SSVNFAEFSK

SEQ ID NO: 11164 - protein, 8 aa, synthetic construct
SSYPVALI

SEQ ID NO: 11165 - protein, 8 aa, synthetic construct
SSMQVPVI

SEQ ID NO: 11166 - protein, 9 aa, synthetic construct
STARHLYLR

SEQ ID NO: 11167 - protein, 10 aa, synthetic construct
STDKAEYTFY

SEQ ID NO: 11168 - protein, 9 aa, synthetic construct
STDLQDYTY

SEQ ID NO: 11169 - protein, 10 aa, synthetic construct
STDLQDYTYY

SEQ ID NO: 11170 - protein, 10 aa, synthetic construct
STDPSVLGKY

SEQ ID NO: 11171 - protein, 9 aa, synthetic construct
STELNHLGY

SEQ ID NO: 11172 - protein, 9 aa, synthetic construct
STFNQVVLK

SEQ ID NO: 11173 - protein, 9 aa, synthetic construct
STFSEIFKK

SEQ ID NO: 11174 - protein, 8 aa, synthetic construct
STGDVNVE

SEQ ID NO: 11175 - protein, 10 aa, synthetic construct
STGDVNVEMN

SEQ ID NO: 11176 - protein, 9 aa, synthetic construct
STIDWNKLY

SEQ ID NO: 11177 - protein, 10 aa, synthetic construct
STIEFDFLGY

SEQ ID NO: 11178 - protein, 10 aa, synthetic construct
STLEEILGQY

SEQ ID NO: 11179 - protein, 8 aa, synthetic construct
STLHLVLR

SEQ ID NO: 11180 - protein, 8 aa, synthetic construct
STLLENIF

SEQ ID NO: 11181 - protein, 9 aa, synthetic construct
STLLENIFA

SEQ ID NO: 11182 - protein, 9 aa, synthetic construct
STNAYMLIY

SEQ ID NO: 11183 - protein, 9 aa, synthetic construct
STPSGYLEL

SEQ ID NO: 11184 - protein, 10 aa, synthetic construct
STTQVVGILK

SEQ ID NO: 11185 - protein, 11 aa, synthetic construct
STVGAGAYAYK

SEQ ID NO: 11186 - protein, 8 aa, synthetic construct
STVTDSKV

SEQ ID NO: 11187 - protein, 10 aa, synthetic construct
STYYGSFVTR

SEQ ID NO: 11188 - protein, 11 aa, synthetic construct
STMQELNSRLA

SEQ ID NO: 11189 - protein, 11 aa, synthetic construct
SVADHSLHLSK

SEQ ID NO: 11190 - protein, 9 aa, synthetic construct
SVAQVVLSR

SEQ ID NO: 11191 - protein, 9 aa, synthetic construct
SVCPVTSGF

SEQ ID NO: 11192 - protein, 10 aa, synthetic construct
SVDGSPTTAF

SEQ ID NO: 11193 - protein, 10 aa, synthetic construct
SVDPHGFISY

SEQ ID NO: 11194 - protein, 9 aa, synthetic construct
SVDPQVLTY

SEQ ID NO: 11195 - protein, 9 aa, synthetic construct
SVDPTQTEY

SEQ ID NO: 11196 - protein, 9 aa, synthetic construct
SVDSQILYY

SEQ ID NO: 11197 - protein, 9 aa, synthetic construct
SVDVTNTTF

SEQ ID NO: 11198 - protein, 9 aa, synthetic construct
SVEESVLLY

SEQ ID NO: 11199 - protein, 9 aa, synthetic construct
SVEGQLEFR

SEQ ID NO: 11200 - protein, 9 aa, synthetic construct
SVELPIVGK

SEQ ID NO: 11201 - protein, 9 aa, synthetic construct
SVFAGVGER

SEQ ID NO: 11202 - protein, 9 aa, synthetic construct
SVFAGVVGV

SEQ ID NO: 11203 - protein, 9 aa, synthetic construct
SVFCGTSTY

SEQ ID NO: 11204 - protein, 9 aa, synthetic construct
SVFEDSNVY

SEQ ID NO: 11205 - protein, 10 aa, synthetic construct
SVFPKPFVQK

SEQ ID NO: 11206 - protein, 11 aa, synthetic construct
SVFTNERFPLR

SEQ ID NO: 11207 - protein, 10 aa, synthetic construct
SVIAHVDHGK

SEQ ID NO: 11208 - protein, 9 aa, synthetic construct
SVIATIQEY

SEQ ID NO: 11209 - protein, 11 aa, synthetic construct
SVIDSAELQAY

SEQ ID NO: 11210 - protein, 9 aa, synthetic construct
SVIESHTEF

SEQ ID NO: 11211 - protein, 9 aa, synthetic construct
SVINPGAIY

SEQ ID NO: 11212 - protein, 10 aa, synthetic construct
SVINPGAIYR

SEQ ID NO: 11213 - protein, 9 aa, synthetic construct
SVIRKIPAL

SEQ ID NO: 11214 - protein, 9 aa, synthetic construct
SVKAQVTSL

SEQ ID NO: 11215 - protein, 9 aa, synthetic construct
SVKEKISMF

SEQ ID NO: 11216 - protein, 8 aa, synthetic construct
SVKFHVLL

SEQ ID NO: 11217 - protein, 10 aa, synthetic construct
SVKLGHPDTL

SEQ ID NO: 11218 - protein, 9 aa, synthetic construct
SVKTKFYVL

SEQ ID NO: 11219 - protein, 8 aa, synthetic construct
SVKYHYEL

SEQ ID NO: 11220 - protein, 9 aa, synthetic construct
SVLDLVVAL

SEQ ID NO: 11221 - protein, 9 aa, synthetic construct
SVLDYFSER

SEQ ID NO: 11222 - protein, 9 aa, synthetic construct
SVLEALSGV

SEQ ID NO: 11223 - protein, 9 aa, synthetic construct
SVLGSLSSV

SEQ ID NO: 11224 - protein, 10 aa, synthetic construct
SVLIQKQIFK

SEQ ID NO: 11225 - protein, 9 aa, synthetic construct
SVLNLVIVK

SEQ ID NO: 11226 - protein, 10 aa, synthetic construct
SVLNLVIVKK

SEQ ID NO: 11227 - protein, 9 aa, synthetic construct
SVMELARLK

SEQ ID NO: 11228 - protein, 9 aa, synthetic construct
SVNFSEFSK

SEQ ID NO: 11229 - protein, 8 aa, synthetic construct
SVNSHFMK

SEQ ID NO: 11230 - protein, 9 aa, synthetic construct
SVNSVVSTF

SEQ ID NO: 11231 - protein, 10 aa, synthetic construct
SVPDGFLSEL

SEQ ID NO: 11232 - protein, 11 aa, synthetic construct
SVPEFPLSPPK

SEQ ID NO: 11233 - protein, 9 aa, synthetic construct
SVPEYVYNL

SEQ ID NO: 11234 - protein, 9 aa, synthetic construct
SVPFAATAT

SEQ ID NO: 11235 - protein, 9 aa, synthetic construct
SVPLPISHK

SEQ ID NO: 11236 - protein, 9 aa, synthetic construct
SVPPYGVAL

SEQ ID NO: 11237 - protein, 9 aa, synthetic construct
SVPSAVSSL

SEQ ID NO: 11238 - protein, 9 aa, synthetic construct
SVPTATQTL

SEQ ID NO: 11239 - protein, 9 aa, synthetic construct
SVQAFASSL

SEQ ID NO: 11240 - protein, 9 aa, synthetic construct
SVQGIIIYR

SEQ ID NO: 11241 - protein, 9 aa, synthetic construct
SVQSGNLAL

SEQ ID NO: 11242 - protein, 10 aa, synthetic construct
SVRYSSSKHY

SEQ ID NO: 11243 - protein, 11 aa, synthetic construct
SVRYSSSKHYS

SEQ ID NO: 11244 - protein, 10 aa, synthetic construct
SVSDIIVVAK

SEQ ID NO: 11245 - protein, 9 aa, synthetic construct
SVSEVIEGY

SEQ ID NO: 11246 - protein, 9 aa, synthetic construct
SVSGYIYHK

SEQ ID NO: 11247 - protein, 9 aa, synthetic construct
SVSLPSVKK

SEQ ID NO: 11248 - protein, 9 aa, synthetic construct
SVSNVVITK

SEQ ID NO: 11249 - protein, 9 aa, synthetic construct
SVSPVVHVR

SEQ ID NO: 11250 - protein, 9 aa, synthetic construct
SVVDDIPEF

SEQ ID NO: 11251 - protein, 9 aa, synthetic construct
SVVELINHY

SEQ ID NO: 11252 - protein, 9 aa, synthetic construct
SVVSLSESY

SEQ ID NO: 11253 - protein, 9 aa, synthetic construct
SVWHGTLSK

SEQ ID NO: 11254 - protein, 10 aa, synthetic construct
SVYDALPLTR

SEQ ID NO: 11255 - protein, 10 aa, synthetic construct
SVYDHQGIFK

SEQ ID NO: 11256 - protein, 11 aa, synthetic construct
SVYDHQGIFKR

SEQ ID NO: 11257 - protein, 9 aa, synthetic construct
SVYVLVRQK

SEQ ID NO: 11258 - protein, 9 aa, synthetic construct
SVYVYKVLK

SEQ ID NO: 11259 - protein, 9 aa, synthetic construct
SVMTLVSTY

SEQ ID NO: 11260 - protein, 9 aa, synthetic construct
SYAEALREV

SEQ ID NO: 11261 - protein, 9 aa, synthetic construct
SYDHVELTF

SEQ ID NO: 11262 - protein, 9 aa, synthetic construct
SYDLAIKAI

SEQ ID NO: 11263 - protein, 9 aa, synthetic construct
SYDLFVNSF

SEQ ID NO: 11264 - protein, 10 aa, synthetic construct
SYDPTIENTF

SEQ ID NO: 11265 - protein, 9 aa, synthetic construct
SYFPEITHI

SEQ ID NO: 11266 - protein, 9 aa, synthetic construct
SYIALPLTL

SEQ ID NO: 11267 - protein, 9 aa, synthetic construct
SYIPLFPQL

SEQ ID NO: 11268 - protein, 9 aa, synthetic construct
SYLDKVRAL

SEQ ID NO: 11269 - protein, 9 aa, synthetic construct
SYLPFTEAF

SEQ ID NO: 11270 - protein, 9 aa, synthetic construct
SYLTSASSL

SEQ ID NO: 11271 - protein, 9 aa, synthetic construct
SYNDYVREF

SEQ ID NO: 11272 - protein, 9 aa, synthetic construct
SYNNFFRMF

SEQ ID NO: 11273 - protein, 9 aa, synthetic construct
SYPDLLPTF

SEQ ID NO: 11274 - protein, 9 aa, synthetic construct
SYPGSSYIF

SEQ ID NO: 11275 - protein, 9 aa, synthetic construct
SYPNVFLVF

SEQ ID NO: 11276 - protein, 9 aa, synthetic construct
SYPTKVRLI

SEQ ID NO: 11277 - protein, 9 aa, synthetic construct
SYPYFVIQY

SEQ ID NO: 11278 - protein, 9 aa, synthetic construct
SYVHYVFRL

SEQ ID NO: 11279 - protein, 9 aa, synthetic construct
SYVQVTSNF

SEQ ID NO: 11280 - protein, 9 aa, synthetic construct
SMAELDIKL

SEQ ID NO: 11281 - protein, 8 aa, synthetic construct
SMAPGLVI

SEQ ID NO: 11282 - protein, 9 aa, synthetic construct
SMAVVIPEA

SEQ ID NO: 11283 - protein, 9 aa, synthetic construct
SMDEALEKF

SEQ ID NO: 11284 - protein, 10 aa, synthetic construct
SMDNNRNLDL

SEQ ID NO: 11285 - protein, 10 aa, synthetic construct
SMDNSRNLDL

SEQ ID NO: 11286 - protein, 9 aa, synthetic construct
SMFGTLPRK

SEQ ID NO: 11287 - protein, 8 aa, synthetic construct
SMIPIKMV

SEQ ID NO: 11288 - protein, 8 aa, synthetic construct
SMIPVLNI

SEQ ID NO: 11289 - protein, 9 aa, synthetic construct
SMSADVPLV

SEQ ID NO: 11290 - protein, 9 aa, synthetic construct
SMSGPLIGV

SEQ ID NO: 11291 - protein, 9 aa, synthetic construct
SMTDVLTML

SEQ ID NO: 11292 - protein, 9 aa, synthetic construct
SMTLAIHEI

SEQ ID NO: 11293 - protein, 9 aa, synthetic construct
SMVDVVMLL

SEQ ID NO: 11294 - protein, 9 aa, synthetic construct
SMYDKVLML

SEQ ID NO: 11295 - protein, 8 aa, synthetic construct
SMMLVQKV

SEQ ID NO: 11296 - protein, 9 aa, synthetic construct
SMMQTLLTV

SEQ ID NO: 11297 - protein, 9 aa, synthetic construct
TAAAALPAF

SEQ ID NO: 11298 - protein, 9 aa, synthetic construct
TAAAPMIGY

SEQ ID NO: 11299 - protein, 9 aa, synthetic construct
TAAAVGAVF

SEQ ID NO: 11300 - protein, 10 aa, synthetic construct
TAADLNLVLY

SEQ ID NO: 11301 - protein, 11 aa, synthetic construct
TAAELAAIVGE

SEQ ID NO: 11302 - protein, 10 aa, synthetic construct
TAAENDFVTL

SEQ ID NO: 11303 - protein, 9 aa, synthetic construct
TAAGLMHTF

SEQ ID NO: 11304 - protein, 10 aa, synthetic construct
TAALIKGELY

SEQ ID NO: 11305 - protein, 9 aa, synthetic construct
TAAPGRFSF

SEQ ID NO: 11306 - protein, 9 aa, synthetic construct
TAAPPAQPL

SEQ ID NO: 11307 - protein, 9 aa, synthetic construct
TAAPSAPAL

SEQ ID NO: 11308 - protein, 11 aa, synthetic construct
TAAPSLKNAAF

SEQ ID NO: 11309 - protein, 9 aa, synthetic construct
TAASRLVTL

SEQ ID NO: 11310 - protein, 9 aa, synthetic construct
TAAWTGTTF

SEQ ID NO: 11311 - protein, 10 aa, synthetic construct
TACGFCFVEY

SEQ ID NO: 11312 - protein, 11 aa, synthetic construct
TACLAIASGIY

SEQ ID NO: 11313 - protein, 9 aa, synthetic construct
TACQQLEVF

SEQ ID NO: 11314 - protein, 9 aa, synthetic construct
TACQVATAF

SEQ ID NO: 11315 - protein, 8 aa, synthetic construct
TACMAFEL

SEQ ID NO: 11316 - protein, 10 aa, synthetic construct
TADGAHFELR

SEQ ID NO: 11317 - protein, 9 aa, synthetic construct
TADVVKVAY

SEQ ID NO: 11318 - protein, 10 aa, synthetic construct
TAEETATLVM

SEQ ID NO: 11319 - protein, 9 aa, synthetic construct
TAEGIILLF

SEQ ID NO: 11320 - protein, 9 aa, synthetic construct
TAFAHLREV

SEQ ID NO: 11321 - protein, 9 aa, synthetic construct
TAFENAYLK

SEQ ID NO: 11322 - protein, 9 aa, synthetic construct
TAFGPWIQK

SEQ ID NO: 11323 - protein, 9 aa, synthetic construct
TAFLGIASF

SEQ ID NO: 11324 - protein, 11 aa, synthetic construct
TAFNNLENLVF

SEQ ID NO: 11325 - protein, 9 aa, synthetic construct
TAFSSGFLK

SEQ ID NO: 11326 - protein, 11 aa, synthetic construct
TAGCAGLEATY

SEQ ID NO: 11327 - protein, 11 aa, synthetic construct
TAGDGLIELRK

SEQ ID NO: 11328 - protein, 8 aa, synthetic construct
TAGFVLTY

SEQ ID NO: 11329 - protein, 9 aa, synthetic construct
TAGRFTQWY

SEQ ID NO: 11330 - protein, 9 aa, synthetic construct
TAHPRVLTV

SEQ ID NO: 11331 - protein, 9 aa, synthetic construct
TAIGTCFGY

SEQ ID NO: 11332 - protein, 9 aa, synthetic construct
TAIRALETY

SEQ ID NO: 11333 - protein, 8 aa, synthetic construct
TAIRHHVL

SEQ ID NO: 11334 - protein, 9 aa, synthetic construct
TALENPVKY

SEQ ID NO: 11335 - protein, 9 aa, synthetic construct
TALETTYQY

SEQ ID NO: 11336 - protein, 9 aa, synthetic construct
TALEMLTAF

SEQ ID NO: 11337 - protein, 9 aa, synthetic construct
TALHIYANY

SEQ ID NO: 11338 - protein, 11 aa, synthetic construct
TALKGVLFAEN

SEQ ID NO: 11339 - protein, 8 aa, synthetic construct
TALKKYVL

SEQ ID NO: 11340 - protein, 9 aa, synthetic construct
TALNPHIGY

SEQ ID NO: 11341 - protein, 9 aa, synthetic construct
TALRKVLSL

SEQ ID NO: 11342 - protein, 9 aa, synthetic construct
TALSWKEAY

SEQ ID NO: 11343 - protein, 9 aa, synthetic construct
TAMTVQILL

SEQ ID NO: 11344 - protein, 9 aa, synthetic construct
TANALALAM

SEQ ID NO: 11345 - protein, 9 aa, synthetic construct
TANSITVTF

SEQ ID NO: 11346 - protein, 9 aa, synthetic construct
TAPAAAVSP

SEQ ID NO: 11347 - protein, 9 aa, synthetic construct
TAPLAICSL

SEQ ID NO: 11348 - protein, 9 aa, synthetic construct
TAPLTLESL

SEQ ID NO: 11349 - protein, 9 aa, synthetic construct
TAPQGNVDL

SEQ ID NO: 11350 - protein, 11 aa, synthetic construct
TAPQLDDEEMY

SEQ ID NO: 11351 - protein, 9 aa, synthetic construct
TAPVPTTEI

SEQ ID NO: 11352 - protein, 11 aa, synthetic construct
TASAASTSVTF

SEQ ID NO: 11353 - protein, 10 aa, synthetic construct
TASEAASYEF

SEQ ID NO: 11354 - protein, 10 aa, synthetic construct
TASETGFLTY

SEQ ID NO: 11355 - protein, 9 aa, synthetic construct
TASLIVCVL

SEQ ID NO: 11356 - protein, 9 aa, synthetic construct
TASSRIHIY

SEQ ID NO: 11357 - protein, 9 aa, synthetic construct
TASSVALDL

SEQ ID NO: 11358 - protein, 9 aa, synthetic construct
TATESFASD

SEQ ID NO: 11359 - protein, 9 aa, synthetic construct
TATSVQDVF

SEQ ID NO: 11360 - protein, 9 aa, synthetic construct
TAVAVFEIL

SEQ ID NO: 11361 - protein, 10 aa, synthetic construct
TAVGEIIQHY

SEQ ID NO: 11362 - protein, 9 aa, synthetic construct
TAVIDHHNY

SEQ ID NO: 11363 - protein, 9 aa, synthetic construct
TAVIPTNVF

SEQ ID NO: 11364 - protein, 9 aa, synthetic construct
TAVKIAPRY

SEQ ID NO: 11365 - protein, 9 aa, synthetic construct
TAVPTLLKY

SEQ ID NO: 11366 - protein, 9 aa, synthetic construct
TAVRVHVSY

SEQ ID NO: 11367 - protein, 8 aa, synthetic construct
TAVVKHVL

SEQ ID NO: 11368 - protein, 11 aa, synthetic construct
TAWEEENLSKY

SEQ ID NO: 11369 - protein, 11 aa, synthetic construct
TAWEEKTLSKY

SEQ ID NO: 11370 - protein, 10 aa, synthetic construct
TAWGDSGVYY

SEQ ID NO: 11371 - protein, 9 aa, synthetic construct
TAYDNFVEL

SEQ ID NO: 11372 - protein, 8 aa, synthetic construct
TAYIRVKV

SEQ ID NO: 11373 - protein, 8 aa, synthetic construct
TAYYALVV

SEQ ID NO: 11374 - protein, 9 aa, synthetic construct
TAMPESNYY

SEQ ID NO: 11375 - protein, 10 aa, synthetic construct
TCFKGLNVLK

SEQ ID NO: 11376 - protein, 9 aa, synthetic construct
TCNNIFIVF

SEQ ID NO: 11377 - protein, 9 aa, synthetic construct
TCTVVAVCY

SEQ ID NO: 11378 - protein, 9 aa, synthetic construct
TCWDGVRNY

SEQ ID NO: 11379 - protein, 9 aa, synthetic construct
TDAIGHLDR

SEQ ID NO: 11380 - protein, 10 aa, synthetic construct
TDGAVNFQEF

SEQ ID NO: 11381 - protein, 8 aa, synthetic construct
TDHYFLRY

SEQ ID NO: 11382 - protein, 9 aa, synthetic construct
TDIFPSVSL

SEQ ID NO: 11383 - protein, 9 aa, synthetic construct
TDLEGTDML

SEQ ID NO: 11384 - protein, 8 aa, synthetic construct
TDLLRSVV

SEQ ID NO: 11385 - protein, 8 aa, synthetic construct
TDYHVRVY

SEQ ID NO: 11386 - protein, 9 aa, synthetic construct
TEADVKIVI

SEQ ID NO: 11387 - protein, 9 aa, synthetic construct
TEAEIDAHL

SEQ ID NO: 11388 - protein, 9 aa, synthetic construct
TEAEIDIRL

SEQ ID NO: 11389 - protein, 8 aa, synthetic construct
TEAPLNPK

SEQ ID NO: 11390 - protein, 9 aa, synthetic construct
TEAPPIIFA

SEQ ID NO: 11391 - protein, 9 aa, synthetic construct
TECVKQICL

SEQ ID NO: 11392 - protein, 11 aa, synthetic construct
TEDPHTVLVEF

SEQ ID NO: 11393 - protein, 8 aa, synthetic construct
TEELAYLK

SEQ ID NO: 11394 - protein, 11 aa, synthetic construct
TEELNREVATN

SEQ ID NO: 11395 - protein, 8 aa, synthetic construct
TEFIFTTI

SEQ ID NO: 11396 - protein, 8 aa, synthetic construct
TEFPGVVA

SEQ ID NO: 11397 - protein, 10 aa, synthetic construct
TEFYLGKRCA

SEQ ID NO: 11398 - protein, 10 aa, synthetic construct
TEGLHGFHVH

SEQ ID NO: 11399 - protein, 9 aa, synthetic construct
TEHINIHQL

SEQ ID NO: 11400 - protein, 9 aa, synthetic construct
TEHLRFTRP

SEQ ID NO: 11401 - protein, 10 aa, synthetic construct
TEIDGRSISL

SEQ ID NO: 11402 - protein, 10 aa, synthetic construct
TEIDSVPPLP

SEQ ID NO: 11403 - protein, 9 aa, synthetic construct
TEIEMLRAA

SEQ ID NO: 11404 - protein, 10 aa, synthetic construct
TEIEWRFTEA

SEQ ID NO: 11405 - protein, 9 aa, synthetic construct
TEIGTMISV

SEQ ID NO: 11406 - protein, 9 aa, synthetic construct
TEILELLVA

SEQ ID NO: 11407 - protein, 9 aa, synthetic construct
TEILETPAT

SEQ ID NO: 11408 - protein, 9 aa, synthetic construct
TEIQLLTTA

SEQ ID NO: 11409 - protein, 9 aa, synthetic construct
TEIRDMLLA

SEQ ID NO: 11410 - protein, 10 aa, synthetic construct
TEITDDLHFY

SEQ ID NO: 11411 - protein, 9 aa, synthetic construct
TEITHAVVI

SEQ ID NO: 11412 - protein, 8 aa, synthetic construct
TEKPKFIL

SEQ ID NO: 11413 - protein, 9 aa, synthetic construct
TELEYIHAL

SEQ ID NO: 11414 - protein, 8 aa, synthetic construct
TELHVISY

SEQ ID NO: 11415 - protein, 9 aa, synthetic construct
TELLIRKLP

SEQ ID NO: 11416 - protein, 9 aa, synthetic construct
TENDIYNFF

SEQ ID NO: 11417 - protein, 10 aa, synthetic construct
TENNFDDTIA

SEQ ID NO: 11418 - protein, 11 aa, synthetic construct
TEQSQIKGYVW

SEQ ID NO: 11419 - protein, 9 aa, synthetic construct
TERAMLIEA

SEQ ID NO: 11420 - protein, 9 aa, synthetic construct
TERVFEVNA

SEQ ID NO: 11421 - protein, 9 aa, synthetic construct
TESFTLLII

SEQ ID NO: 11422 - protein, 9 aa, synthetic construct
TESPENVAL

SEQ ID NO: 11423 - protein, 9 aa, synthetic construct
TESQVVITL

SEQ ID NO: 11424 - protein, 9 aa, synthetic construct
TESVDNEGE

SEQ ID NO: 11425 - protein, 9 aa, synthetic construct
TETVFIVEI

SEQ ID NO: 11426 - protein, 9 aa, synthetic construct
TETVVTEYL

SEQ ID NO: 11427 - protein, 9 aa, synthetic construct
TEVAPLKEA

SEQ ID NO: 11428 - protein, 9 aa, synthetic construct
TEVGEKIAL

SEQ ID NO: 11429 - protein, 8 aa, synthetic construct
TEVHPELY

SEQ ID NO: 11430 - protein, 9 aa, synthetic construct
TEVRELVSL

SEQ ID NO: 11431 - protein, 8 aa, synthetic construct
TEVTGHRW

SEQ ID NO: 11432 - protein, 9 aa, synthetic construct
TEYAGPLFI

SEQ ID NO: 11433 - protein, 9 aa, synthetic construct
TEYLFLLTI

SEQ ID NO: 11434 - protein, 9 aa, synthetic construct
TFADAHRPK

SEQ ID NO: 11435 - protein, 11 aa, synthetic construct
TFAITGHAEAK

SEQ ID NO: 11436 - protein, 9 aa, synthetic construct
TFDASRTTF

SEQ ID NO: 11437 - protein, 9 aa, synthetic construct
TFDDLPARF

SEQ ID NO: 11438 - protein, 9 aa, synthetic construct
TFDGRLVKK

SEQ ID NO: 11439 - protein, 9 aa, synthetic construct
TFDIASDAF

SEQ ID NO: 11440 - protein, 9 aa, synthetic construct
TFDNEIVMM

SEQ ID NO: 11441 - protein, 8 aa, synthetic construct
TFDPFCYL

SEQ ID NO: 11442 - protein, 9 aa, synthetic construct
TFDPQRQTV

SEQ ID NO: 11443 - protein, 9 aa, synthetic construct
TFDPSLAYY

SEQ ID NO: 11444 - protein, 9 aa, synthetic construct
TFDVSLLTI

SEQ ID NO: 11445 - protein, 9 aa, synthetic construct
TFEDVAVTF

SEQ ID NO: 11446 - protein, 9 aa, synthetic construct
TFIDDLFAF

SEQ ID NO: 11447 - protein, 9 aa, synthetic construct
TFIQRVQSL

SEQ ID NO: 11448 - protein, 9 aa, synthetic construct
TFKESIVSL

SEQ ID NO: 11449 - protein, 9 aa, synthetic construct
TFNEDVQAL

SEQ ID NO: 11450 - protein, 10 aa, synthetic construct
TFPGLHELVR

SEQ ID NO: 11451 - protein, 9 aa, synthetic construct
TFPMQCSAL

SEQ ID NO: 11452 - protein, 11 aa, synthetic construct
TFTGFTQGDLF

SEQ ID NO: 11453 - protein, 9 aa, synthetic construct
TFVPAMTAI

SEQ ID NO: 11454 - protein, 9 aa, synthetic construct
TGATIFEEY

SEQ ID NO: 11455 - protein, 11 aa, synthetic construct
TGFECRCGNVY

SEQ ID NO: 11456 - protein, 9 aa, synthetic construct
TGFFTVTSY

SEQ ID NO: 11457 - protein, 8 aa, synthetic construct
TGFIFQKV

SEQ ID NO: 11458 - protein, 11 aa, synthetic construct
TGIALPAGALH

SEQ ID NO: 11459 - protein, 9 aa, synthetic construct
TGIVLANSS

SEQ ID NO: 11460 - protein, 9 aa, synthetic construct
TGYLKGYTL

SEQ ID NO: 11461 - protein, 9 aa, synthetic construct
TGYLNTVTV

SEQ ID NO: 11462 - protein, 10 aa, synthetic construct
THINIVVIGH

SEQ ID NO: 11463 - protein, 11 aa, synthetic construct
THLGGEDFDNR

SEQ ID NO: 11464 - protein, 10 aa, synthetic construct
THNLEPYFES

SEQ ID NO: 11465 - protein, 8 aa, synthetic construct
TIAKLVKY

SEQ ID NO: 11466 - protein, 9 aa, synthetic construct
TIDDIVLTI

SEQ ID NO: 11467 - protein, 9 aa, synthetic construct
TIEDGIFEV

SEQ ID NO: 11468 - protein, 9 aa, synthetic construct
TIESPSREL

SEQ ID NO: 11469 - protein, 10 aa, synthetic construct
TIFAGTLITA

SEQ ID NO: 11470 - protein, 9 aa, synthetic construct
TIFGKIIRK

SEQ ID NO: 11471 - protein, 9 aa, synthetic construct
TIIDAPGHR

SEQ ID NO: 11472 - protein, 11 aa, synthetic construct
TIIDLPGITRV

SEQ ID NO: 11473 - protein, 11 aa, synthetic construct
TIIDTKGVTAL

SEQ ID NO: 11474 - protein, 9 aa, synthetic construct
TIIECLHSF

SEQ ID NO: 11475 - protein, 9 aa, synthetic construct
TIINLTHHF

SEQ ID NO: 11476 - protein, 9 aa, synthetic construct
TIINTFHQY

SEQ ID NO: 11477 - protein, 9 aa, synthetic construct
TIKEKQYIL

SEQ ID NO: 11478 - protein, 11 aa, synthetic construct
TIKIMASGIKT

SEQ ID NO: 11479 - protein, 9 aa, synthetic construct
TIKKRFKVL

SEQ ID NO: 11480 - protein, 9 aa, synthetic construct
TIKQHILHL

SEQ ID NO: 11481 - protein, 9 aa, synthetic construct
TIKSGDLEY

SEQ ID NO: 11482 - protein, 9 aa, synthetic construct
TIKYKPKQL

SEQ ID NO: 11483 - protein, 9 aa, synthetic construct
TILDKAMVL

SEQ ID NO: 11484 - protein, 11 aa, synthetic construct
TIMPKDIQLAR

SEQ ID NO: 11485 - protein, 10 aa, synthetic construct
TINGHNAEVR

SEQ ID NO: 11486 - protein, 8 aa, synthetic construct
TIRNIPHL

SEQ ID NO: 11487 - protein, 10 aa, synthetic construct
TISDRYYTAL

SEQ ID NO: 11488 - protein, 9 aa, synthetic construct
TISDTILEV

SEQ ID NO: 11489 - protein, 9 aa, synthetic construct
TISPPLQPK

SEQ ID NO: 11490 - protein, 10 aa, synthetic construct
TISSNVASKA

SEQ ID NO: 11491 - protein, 9 aa, synthetic construct
TIMAHVTEF

SEQ ID NO: 11492 - protein, 9 aa, synthetic construct
TIMPKDIQL

SEQ ID NO: 11493 - protein, 10 aa, synthetic construct
TIMPKDIQLA

SEQ ID NO: 11494 - protein, 9 aa, synthetic construct
TKPAIIFRI

SEQ ID NO: 11495 - protein, 8 aa, synthetic construct
TKRPNTFF

SEQ ID NO: 11496 - protein, 8 aa, synthetic construct
TKTEESPA

SEQ ID NO: 11497 - protein, 9 aa, synthetic construct
TLADILLYY

SEQ ID NO: 11498 - protein, 9 aa, synthetic construct
TLAELLVLL

SEQ ID NO: 11499 - protein, 9 aa, synthetic construct
TLAQRVKEV

SEQ ID NO: 11500 - protein, 9 aa, synthetic construct
TLAYLPEEY

SEQ ID NO: 11501 - protein, 9 aa, synthetic construct
TLDDLIAAV

SEQ ID NO: 11502 - protein, 9 aa, synthetic construct
TLDEATPTL

SEQ ID NO: 11503 - protein, 9 aa, synthetic construct
TLDGSLHAV

SEQ ID NO: 11504 - protein, 9 aa, synthetic construct
TLDPNVTGV

SEQ ID NO: 11505 - protein, 10 aa, synthetic construct
TLDPQTGLFY

SEQ ID NO: 11506 - protein, 9 aa, synthetic construct
TLFDYDVGL

SEQ ID NO: 11507 - protein, 9 aa, synthetic construct
TLFDYEVRL

SEQ ID NO: 11508 - protein, 9 aa, synthetic construct
TLFKKIQAL

SEQ ID NO: 11509 - protein, 9 aa, synthetic construct
TLGNVLVTV

SEQ ID NO: 11510 - protein, 8 aa, synthetic construct
TLGPVPEI

SEQ ID NO: 11511 - protein, 9 aa, synthetic construct
TLGQEFSGY

SEQ ID NO: 11512 - protein, 8 aa, synthetic construct
TLGQIWDV

SEQ ID NO: 11513 - protein, 11 aa, synthetic construct
TLHGLQQYYVK

SEQ ID NO: 11514 - protein, 9 aa, synthetic construct
TLHPDLGTD

SEQ ID NO: 11515 - protein, 11 aa, synthetic construct
TLIAYGANVNC

SEQ ID NO: 11516 - protein, 9 aa, synthetic construct
TLIDIMTRF

SEQ ID NO: 11517 - protein, 9 aa, synthetic construct
TLIDSLDTL

SEQ ID NO: 11518 - protein, 9 aa, synthetic construct
TLILSVLTV

SEQ ID NO: 11519 - protein, 9 aa, synthetic construct
TLIRPDGEK

SEQ ID NO: 11520 - protein, 9 aa, synthetic construct
TLITGLEEY

SEQ ID NO: 11521 - protein, 9 aa, synthetic construct
TLKIRAEVL

SEQ ID NO: 11522 - protein, 9 aa, synthetic construct
TLKRTIEAL

SEQ ID NO: 11523 - protein, 9 aa, synthetic construct
TLLDALYEI

SEQ ID NO: 11524 - protein, 9 aa, synthetic construct
TLLDFINAV

SEQ ID NO: 11525 - protein, 10 aa, synthetic construct
TLLDGKLVLL

SEQ ID NO: 11526 - protein, 10 aa, synthetic construct
TLLDYTYTSK

SEQ ID NO: 11527 - protein, 9 aa, synthetic construct
TLLERAFSL

SEQ ID NO: 11528 - protein, 9 aa, synthetic construct
TLLETEMLL

SEQ ID NO: 11529 - protein, 9 aa, synthetic construct
TLLGHEFVL

SEQ ID NO: 11530 - protein, 11 aa, synthetic construct
TLLVMGVFDDD

SEQ ID NO: 11531 - protein, 9 aa, synthetic construct
TLNEKLTAL

SEQ ID NO: 11532 - protein, 8 aa, synthetic construct
TLPIPLQE

SEQ ID NO: 11533 - protein, 9 aa, synthetic construct
TLPTVIAEL

SEQ ID NO: 11534 - protein, 10 aa, synthetic construct
TLPWGTLSSL

SEQ ID NO: 11535 - protein, 9 aa, synthetic construct
TLQDIVYKL

SEQ ID NO: 11536 - protein, 9 aa, synthetic construct
TLRAKLQGL

SEQ ID NO: 11537 - protein, 9 aa, synthetic construct
TLRLKVEEL

SEQ ID NO: 11538 - protein, 9 aa, synthetic construct
TLSDIVVTL

SEQ ID NO: 11539 - protein, 9 aa, synthetic construct
TLSDIMVSL

SEQ ID NO: 11540 - protein, 9 aa, synthetic construct
TLSDLRVYL

SEQ ID NO: 11541 - protein, 9 aa, synthetic construct
TLSDVVVGL

SEQ ID NO: 11542 - protein, 9 aa, synthetic construct
TLSEVTNQL

SEQ ID NO: 11543 - protein, 9 aa, synthetic construct
TLSKKFQSL

SEQ ID NO: 11544 - protein, 10 aa, synthetic construct
TLTKADLEMQ

SEQ ID NO: 11545 - protein, 9 aa, synthetic construct
TLTSKLYSL

SEQ ID NO: 11546 - protein, 10 aa, synthetic construct
TLVADVNADR

SEQ ID NO: 11547 - protein, 9 aa, synthetic construct
TLVDFPLHL

SEQ ID NO: 11548 - protein, 9 aa, synthetic construct
TLWNQELYI

SEQ ID NO: 11549 - protein, 9 aa, synthetic construct
TLYEAVREV

SEQ ID NO: 11550 - protein, 10 aa, synthetic construct
TLYISECLKK

SEQ ID NO: 11551 - protein, 9 aa, synthetic construct
TLYSGLDEV

SEQ ID NO: 11552 - protein, 9 aa, synthetic construct
TLMEEVLLL

SEQ ID NO: 11553 - protein, 9 aa, synthetic construct
TLMERTVSL

SEQ ID NO: 11554 - protein, 9 aa, synthetic construct
TMPSDVLEV

SEQ ID NO: 11555 - protein, 9 aa, synthetic construct
TMPTDVLEV

SEQ ID NO: 11556 - protein, 8 aa, synthetic construct
TMPVVPSV

SEQ ID NO: 11557 - protein, 11 aa, synthetic construct
TNDWEDHLAVK

SEQ ID NO: 11558 - protein, 9 aa, synthetic construct
TNFEDRNAF

SEQ ID NO: 11559 - protein, 8 aa, synthetic construct
TNKIRELL

SEQ ID NO: 11560 - protein, 9 aa, synthetic construct
TNKSRGFAF

SEQ ID NO: 11561 - protein, 10 aa, synthetic construct
TNNVHYENYR

SEQ ID NO: 11562 - protein, 8 aa, synthetic construct
TNRFIKNL

SEQ ID NO: 11563 - protein, 9 aa, synthetic construct
TNTLRILAL

SEQ ID NO: 11564 - protein, 9 aa, synthetic construct
TNTLSEILD

SEQ ID NO: 11565 - protein, 8 aa, synthetic construct
TNVILSMD

SEQ ID NO: 11566 - protein, 11 aa, synthetic construct
TNVPRASVPDG

SEQ ID NO: 11567 - protein, 9 aa, synthetic construct
TPADGFTVL

SEQ ID NO: 11568 - protein, 10 aa, synthetic construct
TPAEARTTTL

SEQ ID NO: 11569 - protein, 9 aa, synthetic construct
TPAEIREEF

SEQ ID NO: 11570 - protein, 9 aa, synthetic construct
TPAEPVQYY

SEQ ID NO: 11571 - protein, 9 aa, synthetic construct
TPAGDIMEL

SEQ ID NO: 11572 - protein, 9 aa, synthetic construct
TPAGNFVTL

SEQ ID NO: 11573 - protein, 11 aa, synthetic construct
TPALVNAAVTY

SEQ ID NO: 11574 - protein, 9 aa, synthetic construct
TPAPGYPSY

SEQ ID NO: 11575 - protein, 9 aa, synthetic construct
TPAPPDLTL

SEQ ID NO: 11576 - protein, 9 aa, synthetic construct
TPAPPTHAL

SEQ ID NO: 11577 - protein, 9 aa, synthetic construct
TPASPQPFY

SEQ ID NO: 11578 - protein, 9 aa, synthetic construct
TPAVGRLEV

SEQ ID NO: 11579 - protein, 9 aa, synthetic construct
TPAVIRISV

SEQ ID NO: 11580 - protein, 10 aa, synthetic construct
TPCPGPFLRY

SEQ ID NO: 11581 - protein, 9 aa, synthetic construct
TPDPQRVPL

SEQ ID NO: 11582 - protein, 10 aa, synthetic construct
TPDPSANISL

SEQ ID NO: 11583 - protein, 9 aa, synthetic construct
TPDPSRSVF

SEQ ID NO: 11584 - protein, 11 aa, synthetic construct
TPDTGRILSKL

SEQ ID NO: 11585 - protein, 9 aa, synthetic construct
TPEEKLAAL

SEQ ID NO: 11586 - protein, 9 aa, synthetic construct
TPEELAALF

SEQ ID NO: 11587 - protein, 8 aa, synthetic construct
TPELGHVY

SEQ ID NO: 11588 - protein, 9 aa, synthetic construct
TPEQQAAIL

SEQ ID NO: 11589 - protein, 9 aa, synthetic construct
TPETVRMVL

SEQ ID NO: 11590 - protein, 9 aa, synthetic construct
TPFDGTMVY

SEQ ID NO: 11591 - protein, 10 aa, synthetic construct
TPFGGRLLVL

SEQ ID NO: 11592 - protein, 11 aa, synthetic construct
TPFGKDQDWPA

SEQ ID NO: 11593 - protein, 8 aa, synthetic construct
TPFIRPVM

SEQ ID NO: 11594 - protein, 8 aa, synthetic construct
TPFKGGTL

SEQ ID NO: 11595 - protein, 9 aa, synthetic construct
TPFLYDLVM

SEQ ID NO: 11596 - protein, 10 aa, synthetic construct
TPFTVINIMY

SEQ ID NO: 11597 - protein, 8 aa, synthetic construct
TPGNRIVY

SEQ ID NO: 11598 - protein, 9 aa, synthetic construct
TPGPPPISY

SEQ ID NO: 11599 - protein, 9 aa, synthetic construct
TPGPVGLAL

SEQ ID NO: 11600 - protein, 8 aa, synthetic construct
TPHLHSIL

SEQ ID NO: 11601 - protein, 9 aa, synthetic construct
TPHLRNLAV

SEQ ID NO: 11602 - protein, 9 aa, synthetic construct
TPHQTFVRL

SEQ ID NO: 11603 - protein, 9 aa, synthetic construct
TPIDSNIAF

SEQ ID NO: 11604 - protein, 9 aa, synthetic construct
TPIILVGTK

SEQ ID NO: 11605 - protein, 9 aa, synthetic construct
TPIKDGILY

SEQ ID NO: 11606 - protein, 9 aa, synthetic construct
TPIQGTSEL

SEQ ID NO: 11607 - protein, 9 aa, synthetic construct
TPISITSSY

SEQ ID NO: 11608 - protein, 9 aa, synthetic construct
TPISRLVAL

SEQ ID NO: 11609 - protein, 10 aa, synthetic construct
TPIYEGRTYY

SEQ ID NO: 11610 - protein, 10 aa, synthetic construct
TPKEFREISY

SEQ ID NO: 11611 - protein, 9 aa, synthetic construct
TPKKLGNSL

SEQ ID NO: 11612 - protein, 10 aa, synthetic construct
TPKPPAEPAP

SEQ ID NO: 11613 - protein, 8 aa, synthetic construct
TPKYSQVL

SEQ ID NO: 11614 - protein, 9 aa, synthetic construct
TPLHHTWTY

SEQ ID NO: 11615 - protein, 10 aa, synthetic construct
TPLISKLSPY

SEQ ID NO: 11616 - protein, 8 aa, synthetic construct
TPLKKFLL

SEQ ID NO: 11617 - protein, 8 aa, synthetic construct
TPLKKVIL

SEQ ID NO: 11618 - protein, 10 aa, synthetic construct
TPLLTSLPEK

SEQ ID NO: 11619 - protein, 9 aa, synthetic construct
TPLPLIKPY

SEQ ID NO: 11620 - protein, 8 aa, synthetic construct
TPLRKEVL

SEQ ID NO: 11621 - protein, 9 aa, synthetic construct
TPLSATLSL

SEQ ID NO: 11622 - protein, 9 aa, synthetic construct
TPLTKDVSL

SEQ ID NO: 11623 - protein, 11 aa, synthetic construct
TPMDVDKQAIY

SEQ ID NO: 11624 - protein, 9 aa, synthetic construct
TPQGGIVVY

SEQ ID NO: 11625 - protein, 9 aa, synthetic construct
TPQSLFILF

SEQ ID NO: 11626 - protein, 11 aa, synthetic construct
TPRDLAVPAAL

SEQ ID NO: 11627 - protein, 11 aa, synthetic construct
TPRGGVGSVAL

SEQ ID NO: 11628 - protein, 9 aa, synthetic construct
TPRIQGLTV

SEQ ID NO: 11629 - protein, 9 aa, synthetic construct
TPRLILMDL

SEQ ID NO: 11630 - protein, 9 aa, synthetic construct
TPRLPARLI

SEQ ID NO: 11631 - protein, 9 aa, synthetic construct
TPRLPQRNL

SEQ ID NO: 11632 - protein, 11 aa, synthetic construct
TPRPGSAESAL

SEQ ID NO: 11633 - protein, 8 aa, synthetic construct
TPRPKFSV

SEQ ID NO: 11634 - protein, 10 aa, synthetic construct
TPRPVTEPLL

SEQ ID NO: 11635 - protein, 9 aa, synthetic construct
TPRPMTAEL

SEQ ID NO: 11636 - protein, 10 aa, synthetic construct
TPRSGEGTVL

SEQ ID NO: 11637 - protein, 9 aa, synthetic construct
TPRVPDNSL

SEQ ID NO: 11638 - protein, 8 aa, synthetic construct
TPSEAPVL

SEQ ID NO: 11639 - protein, 9 aa, synthetic construct
TPSEPHPVL

SEQ ID NO: 11640 - protein, 9 aa, synthetic construct
TPSERITSL

SEQ ID NO: 11641 - protein, 9 aa, synthetic construct
TPSIRNLAM

SEQ ID NO: 11642 - protein, 9 aa, synthetic construct
TPSKGVLFY

SEQ ID NO: 11643 - protein, 10 aa, synthetic construct
TPSKPSGLSL

SEQ ID NO: 11644 - protein, 11 aa, synthetic construct
TPSLIRAGSRV

SEQ ID NO: 11645 - protein, 9 aa, synthetic construct
TPSPPEVVY

SEQ ID NO: 11646 - protein, 9 aa, synthetic construct
TPSPTRYSL

SEQ ID NO: 11647 - protein, 9 aa, synthetic construct
TPSQPLPTY

SEQ ID NO: 11648 - protein, 9 aa, synthetic construct
TPSRKGLVL

SEQ ID NO: 11649 - protein, 8 aa, synthetic construct
TPTQGSVL

SEQ ID NO: 11650 - protein, 9 aa, synthetic construct
TPVAGSQSL

SEQ ID NO: 11651 - protein, 10 aa, synthetic construct
TPVDLNKHLY

SEQ ID NO: 11652 - protein, 10 aa, synthetic construct
TPVFGKGVAY

SEQ ID NO: 11653 - protein, 9 aa, synthetic construct
TPVFSKARY

SEQ ID NO: 11654 - protein, 9 aa, synthetic construct
TPVIVGSAL

SEQ ID NO: 11655 - protein, 9 aa, synthetic construct
TPVKDLVKY

SEQ ID NO: 11656 - protein, 10 aa, synthetic construct
TPVQPLGVSY

SEQ ID NO: 11657 - protein, 11 aa, synthetic construct
TPVQPNPIVYM

SEQ ID NO: 11658 - protein, 11 aa, synthetic construct
TPVTVSAVKPA

SEQ ID NO: 11659 - protein, 9 aa, synthetic construct
TPWLEAEDY

SEQ ID NO: 11660 - protein, 11 aa, synthetic construct
TPWNQGATPAY

SEQ ID NO: 11661 - protein, 9 aa, synthetic construct
TPWQPPTVL

SEQ ID NO: 11662 - protein, 9 aa, synthetic construct
TPWRGILLF

SEQ ID NO: 11663 - protein, 9 aa, synthetic construct
TPYDDAYYF

SEQ ID NO: 11664 - protein, 9 aa, synthetic construct
TPYDRFCPF

SEQ ID NO: 11665 - protein, 9 aa, synthetic construct
TPMATRLLL

SEQ ID NO: 11666 - protein, 9 aa, synthetic construct
TQDENPVVH

SEQ ID NO: 11667 - protein, 8 aa, synthetic construct
TQFVLSTL

SEQ ID NO: 11668 - protein, 8 aa, synthetic construct
TQIITLQV

SEQ ID NO: 11669 - protein, 10 aa, synthetic construct
TQISETNVIL

SEQ ID NO: 11670 - protein, 8 aa, synthetic construct
TQKDKFML

SEQ ID NO: 11671 - protein, 9 aa, synthetic construct
TQKEQLLRV

SEQ ID NO: 11672 - protein, 8 aa, synthetic construct
TQLAVNKI

SEQ ID NO: 11673 - protein, 9 aa, synthetic construct
TQLPQSMKI

SEQ ID NO: 11674 - protein, 9 aa, synthetic construct
TQRLFFLQV

SEQ ID NO: 11675 - protein, 8 aa, synthetic construct
TQTVISSI

SEQ ID NO: 11676 - protein, 9 aa, synthetic construct
TQYIFTEKL

SEQ ID NO: 11677 - protein, 8 aa, synthetic construct
TQYIPLSI

SEQ ID NO: 11678 - protein, 8 aa, synthetic construct
TQYKFRLT

SEQ ID NO: 11679 - protein, 9 aa, synthetic construct
TQYKFRLTA

SEQ ID NO: 11680 - protein, 8 aa, synthetic construct
TQYTFSSI

SEQ ID NO: 11681 - protein, 9 aa, synthetic construct
TRAEIQIRI

SEQ ID NO: 11682 - protein, 9 aa, synthetic construct
TRCGCVTML

SEQ ID NO: 11683 - protein, 9 aa, synthetic construct
TRCQFQTKF

SEQ ID NO: 11684 - protein, 9 aa, synthetic construct
TRDPLVIEL

SEQ ID NO: 11685 - protein, 9 aa, synthetic construct
TRDVHIYRL

SEQ ID NO: 11686 - protein, 11 aa, synthetic construct
TRIGVMSLIRK

SEQ ID NO: 11687 - protein, 8 aa, synthetic construct
TRIPKIQK

SEQ ID NO: 11688 - protein, 9 aa, synthetic construct
TRIPKIQKL

SEQ ID NO: 11689 - protein, 9 aa, synthetic construct
TRIPKIQQL

SEQ ID NO: 11690 - protein, 9 aa, synthetic construct
TRIPKVQKL

SEQ ID NO: 11691 - protein, 9 aa, synthetic construct
TRLAKLLRF

SEQ ID NO: 11692 - protein, 9 aa, synthetic construct
TRLEFQQQL

SEQ ID NO: 11693 - protein, 9 aa, synthetic construct
TRLFAVLRF

SEQ ID NO: 11694 - protein, 11 aa, synthetic construct
TRLPKGAVLYK

SEQ ID NO: 11695 - protein, 9 aa, synthetic construct
TRNDIVNML

SEQ ID NO: 11696 - protein, 9 aa, synthetic construct
TRNDYVMMY

SEQ ID NO: 11697 - protein, 9 aa, synthetic construct
TRPLILKTL

SEQ ID NO: 11698 - protein, 9 aa, synthetic construct
TRPPHVQLL

SEQ ID NO: 11699 - protein, 9 aa, synthetic construct
TRSAIILHL

SEQ ID NO: 11700 - protein, 9 aa, synthetic construct
TRTNMLLEL

SEQ ID NO: 11701 - protein, 9 aa, synthetic construct
TRVDTILEF

SEQ ID NO: 11702 - protein, 9 aa, synthetic construct
TRVFSLVGK

SEQ ID NO: 11703 - protein, 9 aa, synthetic construct
TRWNKIVLK

SEQ ID NO: 11704 - protein, 9 aa, synthetic construct
TRWPGFYIL

SEQ ID NO: 11705 - protein, 9 aa, synthetic construct
TRYDLYHTF

SEQ ID NO: 11706 - protein, 11 aa, synthetic construct
TRYIASLKQRY

SEQ ID NO: 11707 - protein, 9 aa, synthetic construct
TRYLKQFHL

SEQ ID NO: 11708 - protein, 9 aa, synthetic construct
TSAAIYHVL

SEQ ID NO: 11709 - protein, 9 aa, synthetic construct
TSALPIIQK

SEQ ID NO: 11710 - protein, 9 aa, synthetic construct
TSCADTLRY

SEQ ID NO: 11711 - protein, 9 aa, synthetic construct
TSCEYVSLY

SEQ ID NO: 11712 - protein, 9 aa, synthetic construct
TSDELQFGY

SEQ ID NO: 11713 - protein, 9 aa, synthetic construct
TSDETTLEY

SEQ ID NO: 11714 - protein, 9 aa, synthetic construct
TSDSTFLVF

SEQ ID NO: 11715 - protein, 9 aa, synthetic construct
TSDSTVYDY

SEQ ID NO: 11716 - protein, 9 aa, synthetic construct
TSDVGGYYY

SEQ ID NO: 11717 - protein, 9 aa, synthetic construct
TSERTVLRY

SEQ ID NO: 11718 - protein, 11 aa, synthetic construct
TSETPDYLLKY

SEQ ID NO: 11719 - protein, 10 aa, synthetic construct
TSFDGSLIQK

SEQ ID NO: 11720 - protein, 9 aa, synthetic construct
TSFDKFYKY

SEQ ID NO: 11721 - protein, 9 aa, synthetic construct
TSIAECLTY

SEQ ID NO: 11722 - protein, 8 aa, synthetic construct
TSKLKYVL

SEQ ID NO: 11723 - protein, 11 aa, synthetic construct
TSLDHCPTKIS

SEQ ID NO: 11724 - protein, 9 aa, synthetic construct
TSPEAFLAL

SEQ ID NO: 11725 - protein, 9 aa, synthetic construct
TSPKASLEL

SEQ ID NO: 11726 - protein, 8 aa, synthetic construct
TSPTVLYV

SEQ ID NO: 11727 - protein, 9 aa, synthetic construct
TSSDILLCY

SEQ ID NO: 11728 - protein, 10 aa, synthetic construct
TSSEITTKDL

SEQ ID NO: 11729 - protein, 10 aa, synthetic construct
TSSIHFEAYR

SEQ ID NO: 11730 - protein, 9 aa, synthetic construct
TSSPNRLVY

SEQ ID NO: 11731 - protein, 9 aa, synthetic construct
TSTLPLTSL

SEQ ID NO: 11732 - protein, 10 aa, synthetic construct
TTCSRQFTSS

SEQ ID NO: 11733 - protein, 9 aa, synthetic construct
TTDDPALLY

SEQ ID NO: 11734 - protein, 11 aa, synthetic construct
TTDLFGRDLSY

SEQ ID NO: 11735 - protein, 9 aa, synthetic construct
TTDVDSLSY

SEQ ID NO: 11736 - protein, 10 aa, synthetic construct
TTEESLRNYY

SEQ ID NO: 11737 - protein, 9 aa, synthetic construct
TTEVHPELY

SEQ ID NO: 11738 - protein, 8 aa, synthetic construct
TTGHLIYK

SEQ ID NO: 11739 - protein, 10 aa, synthetic construct
TTGIVMDSGD

SEQ ID NO: 11740 - protein, 9 aa, synthetic construct
TTGIVMDSG

SEQ ID NO: 11741 - protein, 11 aa, synthetic construct
TTGIVMDSGDG

SEQ ID NO: 11742 - protein, 11 aa, synthetic construct
TTHFVEGGDAG

SEQ ID NO: 11743 - protein, 11 aa, synthetic construct
TTIAGVVYKDG

SEQ ID NO: 11744 - protein, 9 aa, synthetic construct
TTPDVIFVF

SEQ ID NO: 11745 - protein, 9 aa, synthetic construct
TTPIQTAAL

SEQ ID NO: 11746 - protein, 9 aa, synthetic construct
TTPVPQLPL

SEQ ID NO: 11747 - protein, 9 aa, synthetic construct
TTTGHLIYK

SEQ ID NO: 11748 - protein, 9 aa, synthetic construct
TTVDIFHKK

SEQ ID NO: 11749 - protein, 10 aa, synthetic construct
TVAECVAFYY

SEQ ID NO: 11750 - protein, 9 aa, synthetic construct
TVAGGAWTY

SEQ ID NO: 11751 - protein, 11 aa, synthetic construct
TVAGLALIKKY

SEQ ID NO: 11752 - protein, 9 aa, synthetic construct
TVAPFNPTV

SEQ ID NO: 11753 - protein, 9 aa, synthetic construct
TVCDFRLSY

SEQ ID NO: 11754 - protein, 9 aa, synthetic construct
TVDEHVWFY

SEQ ID NO: 11755 - protein, 9 aa, synthetic construct
TVDGPRNEL

SEQ ID NO: 11756 - protein, 11 aa, synthetic construct
TVDKNMPKFNK

SEQ ID NO: 11757 - protein, 11 aa, synthetic construct
TVEERVINEEY

SEQ ID NO: 11758 - protein, 9 aa, synthetic construct
TVFDLVEEY

SEQ ID NO: 11759 - protein, 9 aa, synthetic construct
TVFEDLYDY

SEQ ID NO: 11760 - protein, 10 aa, synthetic construct
TVFGSLIIGY

SEQ ID NO: 11761 - protein, 9 aa, synthetic construct
TVFSTSSLK

SEQ ID NO: 11762 - protein, 9 aa, synthetic construct
TVHGVTQAF

SEQ ID NO: 11763 - protein, 9 aa, synthetic construct
TVHSIISKM

SEQ ID NO: 11764 - protein, 10 aa, synthetic construct
TVIEEHLGKF

SEQ ID NO: 11765 - protein, 9 aa, synthetic construct
TVIHFNNPK

SEQ ID NO: 11766 - protein, 9 aa, synthetic construct
TVIKLAILY

SEQ ID NO: 11767 - protein, 9 aa, synthetic construct
TVISLLVYK

SEQ ID NO: 11768 - protein, 9 aa, synthetic construct
TVITEVTTM

SEQ ID NO: 11769 - protein, 9 aa, synthetic construct
TVKLRAEEL

SEQ ID NO: 11770 - protein, 9 aa, synthetic construct
TVKQKYLSF

SEQ ID NO: 11771 - protein, 9 aa, synthetic construct
TVKVHVVAL

SEQ ID NO: 11772 - protein, 9 aa, synthetic construct
TVLDAIYEV

SEQ ID NO: 11773 - protein, 9 aa, synthetic construct
TVLELNEKI

SEQ ID NO: 11774 - protein, 9 aa, synthetic construct
TVLGYFIGR

SEQ ID NO: 11775 - protein, 9 aa, synthetic construct
TVLGYISAV

SEQ ID NO: 11776 - protein, 10 aa, synthetic construct
TVLPFAGLLY

SEQ ID NO: 11777 - protein, 9 aa, synthetic construct
TVLPFSQEF

SEQ ID NO: 11778 - protein, 9 aa, synthetic construct
TVLPFVSTV

SEQ ID NO: 11779 - protein, 9 aa, synthetic construct
TVLQRPLSL

SEQ ID NO: 11780 - protein, 9 aa, synthetic construct
TVLSRANSL

SEQ ID NO: 11781 - protein, 8 aa, synthetic construct
TVLVIAHR

SEQ ID NO: 11782 - protein, 11 aa, synthetic construct
TVMELVKIIYK

SEQ ID NO: 11783 - protein, 9 aa, synthetic construct
TVMNIAEHY

SEQ ID NO: 11784 - protein, 9 aa, synthetic construct
TVQVYIITK

SEQ ID NO: 11785 - protein, 9 aa, synthetic construct
TVRKILSRL

SEQ ID NO: 11786 - protein, 9 aa, synthetic construct
TVRSPNSPF

SEQ ID NO: 11787 - protein, 9 aa, synthetic construct
TVTAQILLK

SEQ ID NO: 11788 - protein, 11 aa, synthetic construct
TVTEAGMAIAM

SEQ ID NO: 11789 - protein, 9 aa, synthetic construct
TVTEVLLKY

SEQ ID NO: 11790 - protein, 10 aa, synthetic construct
TVTPSEAPVL

SEQ ID NO: 11791 - protein, 9 aa, synthetic construct
TVTSATIVY

SEQ ID NO: 11792 - protein, 10 aa, synthetic construct
TVVRVCEVTY

SEQ ID NO: 11793 - protein, 9 aa, synthetic construct
TVYEGFISA

SEQ ID NO: 11794 - protein, 9 aa, synthetic construct
TVYGGLMYI

SEQ ID NO: 11795 - protein, 10 aa, synthetic construct
TVYGGYLCSV

SEQ ID NO: 11796 - protein, 9 aa, synthetic construct
TVYPMERLV

SEQ ID NO: 11797 - protein, 9 aa, synthetic construct
TVYVSMIAL

SEQ ID NO: 11798 - protein, 9 aa, synthetic construct
TVMGRIATL

SEQ ID NO: 11799 - protein, 10 aa, synthetic construct
TYDDRAYSSF

SEQ ID NO: 11800 - protein, 9 aa, synthetic construct
TYDLQESNV

SEQ ID NO: 11801 - protein, 9 aa, synthetic construct
TYDPTYSDF

SEQ ID NO: 11802 - protein, 10 aa, synthetic construct
TYDYGGFTMM

SEQ ID NO: 11803 - protein, 9 aa, synthetic construct
TYGPSFPAF

SEQ ID NO: 11804 - protein, 11 aa, synthetic construct
TYIHALDNGLF

SEQ ID NO: 11805 - protein, 9 aa, synthetic construct
TYLDIPLVI

SEQ ID NO: 11806 - protein, 9 aa, synthetic construct
TYLEKAIKI

SEQ ID NO: 11807 - protein, 9 aa, synthetic construct
TYLPTSPLL

SEQ ID NO: 11808 - protein, 9 aa, synthetic construct
TYLTIFDLF

SEQ ID NO: 11809 - protein, 9 aa, synthetic construct
TYNKVLHFF

SEQ ID NO: 11810 - protein, 9 aa, synthetic construct
TYPHWVEKL

SEQ ID NO: 11811 - protein, 9 aa, synthetic construct
TYQEVAQKF

SEQ ID NO: 11812 - protein, 9 aa, synthetic construct
TYQQLFYLL

SEQ ID NO: 11813 - protein, 9 aa, synthetic construct
TYRLFAVVY

SEQ ID NO: 11814 - protein, 9 aa, synthetic construct
TYTDRVFFL

SEQ ID NO: 11815 - protein, 9 aa, synthetic construct
TYVPWPLML

SEQ ID NO: 11816 - protein, 9 aa, synthetic construct
TYVSFPLEL

SEQ ID NO: 11817 - protein, 9 aa, synthetic construct
TYVTILPEL

SEQ ID NO: 11818 - protein, 9 aa, synthetic construct
TYVYFTNEL

SEQ ID NO: 11819 - protein, 9 aa, synthetic construct
TYYGSFVTR

SEQ ID NO: 11820 - protein, 9 aa, synthetic construct
TMADQIVTV

SEQ ID NO: 11821 - protein, 9 aa, synthetic construct
TMIGEIAAA

SEQ ID NO: 11822 - protein, 8 aa, synthetic construct
TMPVTMLI

SEQ ID NO: 11823 - protein, 8 aa, synthetic construct
TMVLVSWI

SEQ ID NO: 11824 - protein, 11 aa, synthetic construct
VAAESALDRLA

SEQ ID NO: 11825 - protein, 9 aa, synthetic construct
VAAFTVSSY

SEQ ID NO: 11826 - protein, 10 aa, synthetic construct
VAAQAVASAA

SEQ ID NO: 11827 - protein, 9 aa, synthetic construct
VAAVVALIY

SEQ ID NO: 11828 - protein, 9 aa, synthetic construct
VACPPPPAY

SEQ ID NO: 11829 - protein, 9 aa, synthetic construct
VADEGICYL

SEQ ID NO: 11830 - protein, 9 aa, synthetic construct
VADFSGFLK

SEQ ID NO: 11831 - protein, 9 aa, synthetic construct
VADKVHLMY

SEQ ID NO: 11832 - protein, 9 aa, synthetic construct
VADLVENSY

SEQ ID NO: 11833 - protein, 9 aa, synthetic construct
VADPVEAVL

SEQ ID NO: 11834 - protein, 9 aa, synthetic construct
VADYEATTF

SEQ ID NO: 11835 - protein, 9 aa, synthetic construct
VAFPVGNAF

SEQ ID NO: 11836 - protein, 9 aa, synthetic construct
VAKAVTQAL

SEQ ID NO: 11837 - protein, 9 aa, synthetic construct
VAKLILVNF

SEQ ID NO: 11838 - protein, 8 aa, synthetic construct
VALEFLDR

SEQ ID NO: 11839 - protein, 9 aa, synthetic construct
VALGNMYEL

SEQ ID NO: 11840 - protein, 10 aa, synthetic construct
VALPGVAVSM

SEQ ID NO: 11841 - protein, 9 aa, synthetic construct
VALPVYLLI

SEQ ID NO: 11842 - protein, 10 aa, synthetic construct
VAMNPTNTVF

SEQ ID NO: 11843 - protein, 9 aa, synthetic construct
VANETGAFF

SEQ ID NO: 11844 - protein, 9 aa, synthetic construct
VANNRIITL

SEQ ID NO: 11845 - protein, 9 aa, synthetic construct
VANPNSAIF

SEQ ID NO: 11846 - protein, 9 aa, synthetic construct
VANVSLLAL

SEQ ID NO: 11847 - protein, 8 aa, synthetic construct
VAPAGITL

SEQ ID NO: 11848 - protein, 8 aa, synthetic construct
VAPAGVTL

SEQ ID NO: 11849 - protein, 9 aa, synthetic construct
VAPEEHPVL

SEQ ID NO: 11850 - protein, 10 aa, synthetic construct
VAPEEHPVLL

SEQ ID NO: 11851 - protein, 11 aa, synthetic construct
VAPEEHPVLLT

SEQ ID NO: 11852 - protein, 9 aa, synthetic construct
VAPGLVLGL

SEQ ID NO: 11853 - protein, 11 aa, synthetic construct
VAPGQEKISSL

SEQ ID NO: 11854 - protein, 9 aa, synthetic construct
VAPGSVQCL

SEQ ID NO: 11855 - protein, 9 aa, synthetic construct
VAPPGCSHL

SEQ ID NO: 11856 - protein, 9 aa, synthetic construct
VAPPGNISL

SEQ ID NO: 11857 - protein, 9 aa, synthetic construct
VAPPSFVAI

SEQ ID NO: 11858 - protein, 10 aa, synthetic construct
VAPPSTSAAL

SEQ ID NO: 11859 - protein, 9 aa, synthetic construct
VAPVPCTTL

SEQ ID NO: 11860 - protein, 9 aa, synthetic construct
VAQDLGLVY

SEQ ID NO: 11861 - protein, 8 aa, synthetic construct
VAQHDVYK

SEQ ID NO: 11862 - protein, 9 aa, synthetic construct
VAQSTRIIY

SEQ ID NO: 11863 - protein, 9 aa, synthetic construct
VARPLSTAL

SEQ ID NO: 11864 - protein, 8 aa, synthetic construct
VASFKHAL

SEQ ID NO: 11865 - protein, 9 aa, synthetic construct
VATDFFTVL

SEQ ID NO: 11866 - protein, 9 aa, synthetic construct
VATGVISTL

SEQ ID NO: 11867 - protein, 9 aa, synthetic construct
VAVDVAVPK

SEQ ID NO: 11868 - protein, 9 aa, synthetic construct
VAVEVVTTM

SEQ ID NO: 11869 - protein, 9 aa, synthetic construct
VAVGFPMMI

SEQ ID NO: 11870 - protein, 9 aa, synthetic construct
VAVGRALYY

SEQ ID NO: 11871 - protein, 9 aa, synthetic construct
VAVPNILLF

SEQ ID NO: 11872 - protein, 8 aa, synthetic construct
VAYEAPSL

SEQ ID NO: 11873 - protein, 8 aa, synthetic construct
VAMQRQVL

SEQ ID NO: 11874 - protein, 8 aa, synthetic construct
VDDMPNAL

SEQ ID NO: 11875 - protein, 11 aa, synthetic construct
VDFESAEDLEK

SEQ ID NO: 11876 - protein, 8 aa, synthetic construct
VDLEHHSY

SEQ ID NO: 11877 - protein, 10 aa, synthetic construct
VDLLNQEIEF

SEQ ID NO: 11878 - protein, 10 aa, synthetic construct
VDLMAHMASK

SEQ ID NO: 11879 - protein, 11 aa, synthetic construct
VDPEIQNVKAQ

SEQ ID NO: 11880 - protein, 8 aa, synthetic construct
VDQIRPDR

SEQ ID NO: 11881 - protein, 8 aa, synthetic construct
VDTVLMAP

SEQ ID NO: 11882 - protein, 9 aa, synthetic construct
VDVTPFIKK

SEQ ID NO: 11883 - protein, 9 aa, synthetic construct
VEADLVEAL

SEQ ID NO: 11884 - protein, 10 aa, synthetic construct
VEATAYGLIK

SEQ ID NO: 11885 - protein, 11 aa, synthetic construct
VEDLESVGKGA

SEQ ID NO: 11886 - protein, 8 aa, synthetic construct
VEEAENGR

SEQ ID NO: 11887 - protein, 10 aa, synthetic construct
VEESVTGVHR

SEQ ID NO: 11888 - protein, 9 aa, synthetic construct
VEFDSVQSA

SEQ ID NO: 11889 - protein, 9 aa, synthetic construct
VEFEDFSQP

SEQ ID NO: 11890 - protein, 9 aa, synthetic construct
VEFEDPRDA

SEQ ID NO: 11891 - protein, 9 aa, synthetic construct
VEFEDVLGA

SEQ ID NO: 11892 - protein, 9 aa, synthetic construct
VEFEGYRMC

SEQ ID NO: 11893 - protein, 9 aa, synthetic construct
VEFHRLWSA

SEQ ID NO: 11894 - protein, 11 aa, synthetic construct
VEFVFSEGSEA

SEQ ID NO: 11895 - protein, 11 aa, synthetic construct
VEGRLSALLQE

SEQ ID NO: 11896 - protein, 9 aa, synthetic construct
VEGSIAEKW

SEQ ID NO: 11897 - protein, 9 aa, synthetic construct
VEHDAFIFA

SEQ ID NO: 11898 - protein, 10 aa, synthetic construct
VEIDRTFAEA

SEQ ID NO: 11899 - protein, 10 aa, synthetic construct
VEIRSGFLAA

SEQ ID NO: 11900 - protein, 9 aa, synthetic construct
VELFLNSTA

SEQ ID NO: 11901 - protein, 8 aa, synthetic construct
VELHVHLD

SEQ ID NO: 11902 - protein, 11 aa, synthetic construct
VELLKPSLSRI

SEQ ID NO: 11903 - protein, 9 aa, synthetic construct
VEPEVAIHR

SEQ ID NO: 11904 - protein, 8 aa, synthetic construct
VERRVPFI

SEQ ID NO: 11905 - protein, 9 aa, synthetic construct
VEVDTFMEA

SEQ ID NO: 11906 - protein, 9 aa, synthetic construct
VEVGGDVQL

SEQ ID NO: 11907 - protein, 10 aa, synthetic construct
VEVGGDVQLD

SEQ ID NO: 11908 - protein, 9 aa, synthetic construct
VEWSAFLEA

SEQ ID NO: 11909 - protein, 9 aa, synthetic construct
VEYDEFTTL

SEQ ID NO: 11910 - protein, 9 aa, synthetic construct
VEYDFHLLP

SEQ ID NO: 11911 - protein, 9 aa, synthetic construct
VEYGFQVKV

SEQ ID NO: 11912 - protein, 11 aa, synthetic construct
VFATPVLSIDE

SEQ ID NO: 11913 - protein, 9 aa, synthetic construct
VFDDIETNM

SEQ ID NO: 11914 - protein, 9 aa, synthetic construct
VFDEADRMF

SEQ ID NO: 11915 - protein, 9 aa, synthetic construct
VFDEAIRAV

SEQ ID NO: 11916 - protein, 10 aa, synthetic construct
VFDEAIRAVL

SEQ ID NO: 11917 - protein, 8 aa, synthetic construct
VFDEAVRV

SEQ ID NO: 11918 - protein, 9 aa, synthetic construct
VFDKTLAEL

SEQ ID NO: 11919 - protein, 9 aa, synthetic construct
VFDLGGGTF

SEQ ID NO: 11920 - protein, 9 aa, synthetic construct
VFDNVKDFF

SEQ ID NO: 11921 - protein, 9 aa, synthetic construct
VFDPVPVGV

SEQ ID NO: 11922 - protein, 9 aa, synthetic construct
VFDPVQKTL

SEQ ID NO: 11923 - protein, 8 aa, synthetic construct
VFDPVTKL

SEQ ID NO: 11924 - protein, 8 aa, synthetic construct
VFDRHVVL

SEQ ID NO: 11925 - protein, 9 aa, synthetic construct
VFDVIIRCF

SEQ ID NO: 11926 - protein, 9 aa, synthetic construct
VFDVSHNAV

SEQ ID NO: 11927 - protein, 10 aa, synthetic construct
VFDVTKGSKF

SEQ ID NO: 11928 - protein, 9 aa, synthetic construct
VFDWIEANL

SEQ ID NO: 11929 - protein, 9 aa, synthetic construct
VFDYSINSV

SEQ ID NO: 11930 - protein, 8 aa, synthetic construct
VFGVILSL

SEQ ID NO: 11931 - protein, 10 aa, synthetic construct
VFHPSQDLVF

SEQ ID NO: 11932 - protein, 9 aa, synthetic construct
VFHVQQTEM

SEQ ID NO: 11933 - protein, 9 aa, synthetic construct
VFIDGPLAL

SEQ ID NO: 11934 - protein, 9 aa, synthetic construct
VFLPRVTEL

SEQ ID NO: 11935 - protein, 9 aa, synthetic construct
VFNDVRLLL

SEQ ID NO: 11936 - protein, 8 aa, synthetic construct
VFPSIVGR

SEQ ID NO: 11937 - protein, 8 aa, synthetic construct
VFPTIATI

SEQ ID NO: 11938 - protein, 9 aa, synthetic construct
VFQERINCL

SEQ ID NO: 11939 - protein, 8 aa, synthetic construct
VFQPVAEL

SEQ ID NO: 11940 - protein, 9 aa, synthetic construct
VFRDQEPKI

SEQ ID NO: 11941 - protein, 9 aa, synthetic construct
VFVDSVPEF

SEQ ID NO: 11942 - protein, 9 aa, synthetic construct
VGCPIDLVY

SEQ ID NO: 11943 - protein, 8 aa, synthetic construct
VGDEAQSK

SEQ ID NO: 11944 - protein, 9 aa, synthetic construct
VGDLPNGRV

SEQ ID NO: 11945 - protein, 11 aa, synthetic construct
VGDLPNGRVCP

SEQ ID NO: 11946 - protein, 9 aa, synthetic construct
VGDPAVVFL

SEQ ID NO: 11947 - protein, 8 aa, synthetic construct
VGFVLLTV

SEQ ID NO: 11948 - protein, 11 aa, synthetic construct
VGHEYVAEVEK

SEQ ID NO: 11949 - protein, 9 aa, synthetic construct
VGHPFVIQL

SEQ ID NO: 11950 - protein, 9 aa, synthetic construct
VGIDLGTTY

SEQ ID NO: 11951 - protein, 9 aa, synthetic construct
VGKVKFASL

SEQ ID NO: 11952 - protein, 10 aa, synthetic construct
VGLGGTKSIS

SEQ ID NO: 11953 - protein, 11 aa, synthetic construct
VGLGGTKSISI

SEQ ID NO: 11954 - protein, 9 aa, synthetic construct
VGLIRNLAL

SEQ ID NO: 11955 - protein, 9 aa, synthetic construct
VGLLRLHSL

SEQ ID NO: 11956 - protein, 8 aa, synthetic construct
VGNLNFNK

SEQ ID NO: 11957 - protein, 9 aa, synthetic construct
VGPPGRSSL

SEQ ID NO: 11958 - protein, 8 aa, synthetic construct
VGPVSLPR

SEQ ID NO: 11959 - protein, 9 aa, synthetic construct
VGPYTYREL

SEQ ID NO: 11960 - protein, 11 aa, synthetic construct
VGQSAEPPKPS

SEQ ID NO: 11961 - protein, 8 aa, synthetic construct
VGYLQPLV

SEQ ID NO: 11962 - protein, 11 aa, synthetic construct
VHDVKDVLDSV

SEQ ID NO: 11963 - protein, 8 aa, synthetic construct
VHIEIGPD

SEQ ID NO: 11964 - protein, 8 aa, synthetic construct
VHIQGELV

SEQ ID NO: 11965 - protein, 8 aa, synthetic construct
VHIMDFQR

SEQ ID NO: 11966 - protein, 8 aa, synthetic construct
VHLTPEEK

SEQ ID NO: 11967 - protein, 9 aa, synthetic construct
VHPPPTTTY

SEQ ID NO: 11968 - protein, 8 aa, synthetic construct
VIDEIDGA

SEQ ID NO: 11969 - protein, 9 aa, synthetic construct
VIDGHIYAV

SEQ ID NO: 11970 - protein, 9 aa, synthetic construct
VIDPVAPRY

SEQ ID NO: 11971 - protein, 10 aa, synthetic construct
VIDSAELQAY

SEQ ID NO: 11972 - protein, 8 aa, synthetic construct
VIEDHSNR

SEQ ID NO: 11973 - protein, 9 aa, synthetic construct
VIFDLPTTV

SEQ ID NO: 11974 - protein, 10 aa, synthetic construct
VIHDNFGIVE

SEQ ID NO: 11975 - protein, 11 aa, synthetic construct
VIHDNFGIVEG

SEQ ID NO: 11976 - protein, 8 aa, synthetic construct
VIHFNNPK

SEQ ID NO: 11977 - protein, 9 aa, synthetic construct
VIHLSNLPH

SEQ ID NO: 11978 - protein, 10 aa, synthetic construct
VIILDEAHER

SEQ ID NO: 11979 - protein, 9 aa, synthetic construct
VIINQIYEA

SEQ ID NO: 11980 - protein, 9 aa, synthetic construct
VIKEKALTL

SEQ ID NO: 11981 - protein, 8 aa, synthetic construct
VIKTVPQL

SEQ ID NO: 11982 - protein, 9 aa, synthetic construct
VILESIFLK

SEQ ID NO: 11983 - protein, 9 aa, synthetic construct
VILPPQPPK

SEQ ID NO: 11984 - protein, 8 aa, synthetic construct
VINGNPIT

SEQ ID NO: 11985 - protein, 10 aa, synthetic construct
VIPDIPDHFL

SEQ ID NO: 11986 - protein, 9 aa, synthetic construct
VIPELAQEL

SEQ ID NO: 11987 - protein, 9 aa, synthetic construct
VIPGIFIAL

SEQ ID NO: 11988 - protein, 9 aa, synthetic construct
VIPHIHKSL

SEQ ID NO: 11989 - protein, 9 aa, synthetic construct
VIRAKVKEI

SEQ ID NO: 11990 - protein, 9 aa, synthetic construct
VISPPTVPK

SEQ ID NO: 11991 - protein, 9 aa, synthetic construct
VITETVVEV

SEQ ID NO: 11992 - protein, 11 aa, synthetic construct
VITSHPGQIVK

SEQ ID NO: 11993 - protein, 9 aa, synthetic construct
VIWSHAIQK

SEQ ID NO: 11994 - protein, 10 aa, synthetic construct
VIYPVKYTQT

SEQ ID NO: 11995 - protein, 10 aa, synthetic construct
VKAPAKTEDL

SEQ ID NO: 11996 - protein, 8 aa, synthetic construct
VKDSIRLV

SEQ ID NO: 11997 - protein, 9 aa, synthetic construct
VKDVLDSVL

SEQ ID NO: 11998 - protein, 8 aa, synthetic construct
VKDVLGHY

SEQ ID NO: 11999 - protein, 8 aa, synthetic construct
VKDVNLDI

SEQ ID NO: 12000 - protein, 8 aa, synthetic construct
VKEKVVAL

SEQ ID NO: 12001 - protein, 8 aa, synthetic construct
VKLTVSGF

SEQ ID NO: 12002 - protein, 8 aa, synthetic construct
VKPPGSSL

SEQ ID NO: 12003 - protein, 9 aa, synthetic construct
VKTDTVLIL

SEQ ID NO: 12004 - protein, 11 aa, synthetic construct
VKTLTGKTITL

SEQ ID NO: 12005 - protein, 8 aa, synthetic construct
VKVDPEIQ

SEQ ID NO: 12006 - protein, 9 aa, synthetic construct
VKYNDPIYV

SEQ ID NO: 12007 - protein, 9 aa, synthetic construct
VLADQEVRL

SEQ ID NO: 12008 - protein, 9 aa, synthetic construct
VLADQVWTL

SEQ ID NO: 12009 - protein, 11 aa, synthetic construct
VLAEQNIIPSA

SEQ ID NO: 12010 - protein, 9 aa, synthetic construct
VLAHTILGV

SEQ ID NO: 12011 - protein, 11 aa, synthetic construct
VLAPEGSVPNK

SEQ ID NO: 12012 - protein, 9 aa, synthetic construct
VLAPVSGQF

SEQ ID NO: 12013 - protein, 9 aa, synthetic construct
VLAWGLLNV

SEQ ID NO: 12014 - protein, 9 aa, synthetic construct
VLCDCEIAL

SEQ ID NO: 12015 - protein, 9 aa, synthetic construct
VLCELINAL

SEQ ID NO: 12016 - protein, 9 aa, synthetic construct
VLDDKLVFV

SEQ ID NO: 12017 - protein, 9 aa, synthetic construct
VLDDLLYAV

SEQ ID NO: 12018 - protein, 8 aa, synthetic construct
VLDLDLFR

SEQ ID NO: 12019 - protein, 9 aa, synthetic construct
VLDNLLAFV

SEQ ID NO: 12020 - protein, 9 aa, synthetic construct
VLDNPSPFY

SEQ ID NO: 12021 - protein, 9 aa, synthetic construct
VLFEHAVGY

SEQ ID NO: 12022 - protein, 10 aa, synthetic construct
VLFEKEVNEV

SEQ ID NO: 12023 - protein, 9 aa, synthetic construct
VLFEKKVYL

SEQ ID NO: 12024 - protein, 9 aa, synthetic construct
VLFHNLPSL

SEQ ID NO: 12025 - protein, 9 aa, synthetic construct
VLFTGVKEV

SEQ ID NO: 12026 - protein, 8 aa, synthetic construct
VLGLVLLR

SEQ ID NO: 12027 - protein, 9 aa, synthetic construct
VLHVKTESL

SEQ ID NO: 12028 - protein, 9 aa, synthetic construct
VLIDVGTGY

SEQ ID NO: 12029 - protein, 9 aa, synthetic construct
VLIDYQRNV

SEQ ID NO: 12030 - protein, 9 aa, synthetic construct
VLIPISLYV

SEQ ID NO: 12031 - protein, 9 aa, synthetic construct
VLIQKQIFK

SEQ ID NO: 12032 - protein, 9 aa, synthetic construct
VLKSRFTKL

SEQ ID NO: 12033 - protein, 9 aa, synthetic construct
VLKTHGLLV

SEQ ID NO: 12034 - protein, 8 aa, synthetic construct
VLKYHLLL

SEQ ID NO: 12035 - protein, 9 aa, synthetic construct
VLLDAPIQL

SEQ ID NO: 12036 - protein, 9 aa, synthetic construct
VLLDIFTGV

SEQ ID NO: 12037 - protein, 10 aa, synthetic construct
VLLDYHLNYL

SEQ ID NO: 12038 - protein, 9 aa, synthetic construct
VLLESEQFL

SEQ ID NO: 12039 - protein, 9 aa, synthetic construct
VLLGHIFYV

SEQ ID NO: 12040 - protein, 9 aa, synthetic construct
VLLIADLKL

SEQ ID NO: 12041 - protein, 9 aa, synthetic construct
VLLQMGLHV

SEQ ID NO: 12042 - protein, 9 aa, synthetic construct
VLLSEILHL

SEQ ID NO: 12043 - protein, 11 aa, synthetic construct
VLLTEAPLNPK

SEQ ID NO: 12044 - protein, 11 aa, synthetic construct
VLMQNQKGKGE

SEQ ID NO: 12045 - protein, 8 aa, synthetic construct
VLNGTVAS

SEQ ID NO: 12046 - protein, 9 aa, synthetic construct
VLNPETTVV

SEQ ID NO: 12047 - protein, 10 aa, synthetic construct
VLPDARYSAL

SEQ ID NO: 12048 - protein, 11 aa, synthetic construct
VLPDSGHLHPL

SEQ ID NO: 12049 - protein, 9 aa, synthetic construct
VLPERYSSL

SEQ ID NO: 12050 - protein, 9 aa, synthetic construct
VLPNIQAVL

SEQ ID NO: 12051 - protein, 10 aa, synthetic construct
VLPTLPFHVL

SEQ ID NO: 12052 - protein, 10 aa, synthetic construct
VLPWNAFPGK

SEQ ID NO: 12053 - protein, 9 aa, synthetic construct
VLQDIQVML

SEQ ID NO: 12054 - protein, 9 aa, synthetic construct
VLQQHLETL

SEQ ID NO: 12055 - protein, 9 aa, synthetic construct
VLQQRLIAL

SEQ ID NO: 12056 - protein, 8 aa, synthetic construct
VLRVTHEL

SEQ ID NO: 12057 - protein, 9 aa, synthetic construct
VLSECSPLM

SEQ ID NO: 12058 - protein, 9 aa, synthetic construct
VLSNVEVTL

SEQ ID NO: 12059 - protein, 8 aa, synthetic construct
VLSPADKT

SEQ ID NO: 12060 - protein, 10 aa, synthetic construct
VLSPADKTNV

SEQ ID NO: 12061 - protein, 8 aa, synthetic construct
VLTGYQVD

SEQ ID NO: 12062 - protein, 9 aa, synthetic construct
VLTSNVQTI

SEQ ID NO: 12063 - protein, 9 aa, synthetic construct
VLVADLVNA

SEQ ID NO: 12064 - protein, 9 aa, synthetic construct
VLVDQTTGL

SEQ ID NO: 12065 - protein, 9 aa, synthetic construct
VLVDRTIYI

SEQ ID NO: 12066 - protein, 8 aa, synthetic construct
VLVGGFGL

SEQ ID NO: 12067 - protein, 9 aa, synthetic construct
VLVLYDEIK

SEQ ID NO: 12068 - protein, 10 aa, synthetic construct
VLVLYDEIKK

SEQ ID NO: 12069 - protein, 9 aa, synthetic construct
VLVNDFFLV

SEQ ID NO: 12070 - protein, 9 aa, synthetic construct
VLVMSFIGK

SEQ ID NO: 12071 - protein, 9 aa, synthetic construct
VLYDRVLKY

SEQ ID NO: 12072 - protein, 9 aa, synthetic construct
VLYENPNLK

SEQ ID NO: 12073 - protein, 9 aa, synthetic construct
VLYETEVEV

SEQ ID NO: 12074 - protein, 9 aa, synthetic construct
VLYNESLQL

SEQ ID NO: 12075 - protein, 9 aa, synthetic construct
VLYQPLFDK

SEQ ID NO: 12076 - protein, 9 aa, synthetic construct
VLYSLQICK

SEQ ID NO: 12077 - protein, 9 aa, synthetic construct
VLYSVMTLV

SEQ ID NO: 12078 - protein, 8 aa, synthetic construct
VLYTAVLD

SEQ ID NO: 12079 - protein, 9 aa, synthetic construct
VLMDRLPSL

SEQ ID NO: 12080 - protein, 9 aa, synthetic construct
VLMENIVYL

SEQ ID NO: 12081 - protein, 9 aa, synthetic construct
VLMGSLVYL

SEQ ID NO: 12082 - protein, 9 aa, synthetic construct
VLMPWIHEL

SEQ ID NO: 12083 - protein, 9 aa, synthetic construct
VLMTEDIKL

SEQ ID NO: 12084 - protein, 9 aa, synthetic construct
VMAPRTVLL

SEQ ID NO: 12085 - protein, 9 aa, synthetic construct
VMEYHPRII

SEQ ID NO: 12086 - protein, 8 aa, synthetic construct
VMFTPLTV

SEQ ID NO: 12087 - protein, 8 aa, synthetic construct
VMMGILTI

SEQ ID NO: 12088 - protein, 8 aa, synthetic construct
VMYRVIQV

SEQ ID NO: 12089 - protein, 10 aa, synthetic construct
VNEAACDIAR

SEQ ID NO: 12090 - protein, 9 aa, synthetic construct
VNFTVDQIR

SEQ ID NO: 12091 - protein, 9 aa, synthetic construct
VNHRKELAL

SEQ ID NO: 12092 - protein, 9 aa, synthetic construct
VNIVPVIAK

SEQ ID NO: 12093 - protein, 9 aa, synthetic construct
VNKIKEIAV

SEQ ID NO: 12094 - protein, 11 aa, synthetic construct
VNLGGSKSISI

SEQ ID NO: 12095 - protein, 10 aa, synthetic construct
VPAARSILAL

SEQ ID NO: 12096 - protein, 9 aa, synthetic construct
VPAAVFGSL

SEQ ID NO: 12097 - protein, 9 aa, synthetic construct
VPADAVVQY

SEQ ID NO: 12098 - protein, 9 aa, synthetic construct
VPADILLLF

SEQ ID NO: 12099 - protein, 9 aa, synthetic construct
VPADTPLML

SEQ ID NO: 12100 - protein, 9 aa, synthetic construct
VPADVLEAL

SEQ ID NO: 12101 - protein, 9 aa, synthetic construct
VPAEPKLAF

SEQ ID NO: 12102 - protein, 9 aa, synthetic construct
VPAEPSSLL

SEQ ID NO: 12103 - protein, 9 aa, synthetic construct
VPAESAAVL

SEQ ID NO: 12104 - protein, 9 aa, synthetic construct
VPAEVTVIL

SEQ ID NO: 12105 - protein, 9 aa, synthetic construct
VPAGGAVAV

SEQ ID NO: 12106 - protein, 10 aa, synthetic construct
VPAGGLVATL

SEQ ID NO: 12107 - protein, 10 aa, synthetic construct
VPAKAKLTKL

SEQ ID NO: 12108 - protein, 9 aa, synthetic construct
VPAPDFEWY

SEQ ID NO: 12109 - protein, 10 aa, synthetic construct
VPAPEECYVY

SEQ ID NO: 12110 - protein, 10 aa, synthetic construct
VPAPVPLMSL

SEQ ID NO: 12111 - protein, 9 aa, synthetic construct
VPASFRLQM

SEQ ID NO: 12112 - protein, 8 aa, synthetic construct
VPASFSSL

SEQ ID NO: 12113 - protein, 9 aa, synthetic construct
VPASLPVEF

SEQ ID NO: 12114 - protein, 9 aa, synthetic construct
VPASLMVSL

SEQ ID NO: 12115 - protein, 10 aa, synthetic construct
VPASVTGYSF

SEQ ID NO: 12116 - protein, 11 aa, synthetic construct
VPAVTRAYTAA

SEQ ID NO: 12117 - protein, 9 aa, synthetic construct
VPAVTTPVL

SEQ ID NO: 12118 - protein, 9 aa, synthetic construct
VPANGTYEF

SEQ ID NO: 12119 - protein, 9 aa, synthetic construct
VPDAKIRIF

SEQ ID NO: 12120 - protein, 9 aa, synthetic construct
VPDPNVIKL

SEQ ID NO: 12121 - protein, 11 aa, synthetic construct
VPECQVTTYYY

SEQ ID NO: 12122 - protein, 9 aa, synthetic construct
VPEDLLPVY

SEQ ID NO: 12123 - protein, 9 aa, synthetic construct
VPEEARPAL

SEQ ID NO: 12124 - protein, 11 aa, synthetic construct
VPEEGGATHVY

SEQ ID NO: 12125 - protein, 10 aa, synthetic construct
VPEGRIYTVY

SEQ ID NO: 12126 - protein, 11 aa, synthetic construct
VPESSLAGHSF

SEQ ID NO: 12127 - protein, 9 aa, synthetic construct
VPEVTKPSL

SEQ ID NO: 12128 - protein, 9 aa, synthetic construct
VPFIYGHKY

SEQ ID NO: 12129 - protein, 10 aa, synthetic construct
VPFLPVNPEY

SEQ ID NO: 12130 - protein, 9 aa, synthetic construct
VPFPDTYEI

SEQ ID NO: 12131 - protein, 9 aa, synthetic construct
VPFPLTLRF

SEQ ID NO: 12132 - protein, 8 aa, synthetic construct
VPFRHLLL

SEQ ID NO: 12133 - protein, 8 aa, synthetic construct
VPFSKRYL

SEQ ID NO: 12134 - protein, 10 aa, synthetic construct
VPFSSCLEAY

SEQ ID NO: 12135 - protein, 10 aa, synthetic construct
VPFSVPKIPL

SEQ ID NO: 12136 - protein, 9 aa, synthetic construct
VPFTEEQLF

SEQ ID NO: 12137 - protein, 9 aa, synthetic construct
VPHGHITSL

SEQ ID NO: 12138 - protein, 9 aa, synthetic construct
VPHSIINGY

SEQ ID NO: 12139 - protein, 9 aa, synthetic construct
VPIGATPEY

SEQ ID NO: 12140 - protein, 10 aa, synthetic construct
VPIPDVYQTY

SEQ ID NO: 12141 - protein, 9 aa, synthetic construct
VPISRTEVP

SEQ ID NO: 12142 - protein, 9 aa, synthetic construct
VPKAAIVAR

SEQ ID NO: 12143 - protein, 10 aa, synthetic construct
VPKAPGFAQM

SEQ ID NO: 12144 - protein, 9 aa, synthetic construct
VPKLKVCAL

SEQ ID NO: 12145 - protein, 11 aa, synthetic construct
VPKPIGGVVVF

SEQ ID NO: 12146 - protein, 9 aa, synthetic construct
VPKSLVSNL

SEQ ID NO: 12147 - protein, 9 aa, synthetic construct
VPKTKVVWL

SEQ ID NO: 12148 - protein, 9 aa, synthetic construct
VPKVVGSAV

SEQ ID NO: 12149 - protein, 9 aa, synthetic construct
VPKYWGSGL

SEQ ID NO: 12150 - protein, 9 aa, synthetic construct
VPLAQAQAL

SEQ ID NO: 12151 - protein, 10 aa, synthetic construct
VPLEEVVQEY

SEQ ID NO: 12152 - protein, 9 aa, synthetic construct
VPLEIMIKF

SEQ ID NO: 12153 - protein, 8 aa, synthetic construct
VPLEKETL

SEQ ID NO: 12154 - protein, 9 aa, synthetic construct
VPLRTEEEF

SEQ ID NO: 12155 - protein, 9 aa, synthetic construct
VPNAGRGLV

SEQ ID NO: 12156 - protein, 11 aa, synthetic construct
VPNAGRGLVRL

SEQ ID NO: 12157 - protein, 9 aa, synthetic construct
VPNFIFDEF

SEQ ID NO: 12158 - protein, 8 aa, synthetic construct
VPNVHGAL

SEQ ID NO: 12159 - protein, 9 aa, synthetic construct
VPNWHRDLV

SEQ ID NO: 12160 - protein, 9 aa, synthetic construct
VPNYRTLEF

SEQ ID NO: 12161 - protein, 9 aa, synthetic construct
VPPQKLQAL

SEQ ID NO: 12162 - protein, 9 aa, synthetic construct
VPQEATSTL

SEQ ID NO: 12163 - protein, 9 aa, synthetic construct
VPQPHPQTL

SEQ ID NO: 12164 - protein, 9 aa, synthetic construct
VPQSGVPAL

SEQ ID NO: 12165 - protein, 9 aa, synthetic construct
VPQVKASAL

SEQ ID NO: 12166 - protein, 9 aa, synthetic construct
VPRAILVDL

SEQ ID NO: 12167 - protein, 11 aa, synthetic construct
VPRASVPDGFL

SEQ ID NO: 12168 - protein, 9 aa, synthetic construct
VPREPPVSL

SEQ ID NO: 12169 - protein, 9 aa, synthetic construct
VPRIQPQSL

SEQ ID NO: 12170 - protein, 9 aa, synthetic construct
VPRKSPKYL

SEQ ID NO: 12171 - protein, 11 aa, synthetic construct
VPRKSPKYLAL

SEQ ID NO: 12172 - protein, 9 aa, synthetic construct
VPRLFSLTL

SEQ ID NO: 12173 - protein, 9 aa, synthetic construct
VPRLPGETL

SEQ ID NO: 12174 - protein, 10 aa, synthetic construct
VPRLPGETLI

SEQ ID NO: 12175 - protein, 9 aa, synthetic construct
VPRNYDPAL

SEQ ID NO: 12176 - protein, 9 aa, synthetic construct
VPRPAGGEF

SEQ ID NO: 12177 - protein, 9 aa, synthetic construct
VPRPFQPTL

SEQ ID NO: 12178 - protein, 8 aa, synthetic construct
VPRPGTSL

SEQ ID NO: 12179 - protein, 9 aa, synthetic construct
VPRPPQTSL

SEQ ID NO: 12180 - protein, 11 aa, synthetic construct
VPRPPSLLATL

SEQ ID NO: 12181 - protein, 9 aa, synthetic construct
VPRPVLRAL

SEQ ID NO: 12182 - protein, 10 aa, synthetic construct
VPRQPTVTSV

SEQ ID NO: 12183 - protein, 9 aa, synthetic construct
VPRSASVLL

SEQ ID NO: 12184 - protein, 11 aa, synthetic construct
VPRSPFKVKVL

SEQ ID NO: 12185 - protein, 9 aa, synthetic construct
VPRSSSMVL

SEQ ID NO: 12186 - protein, 11 aa, synthetic construct
VPRTAENFRAL

SEQ ID NO: 12187 - protein, 11 aa, synthetic construct
VPRTETIEESL

SEQ ID NO: 12188 - protein, 10 aa, synthetic construct
VPRTHRLITL

SEQ ID NO: 12189 - protein, 9 aa, synthetic construct
VPRVLGSSV

SEQ ID NO: 12190 - protein, 9 aa, synthetic construct
VPRVPTHTL

SEQ ID NO: 12191 - protein, 9 aa, synthetic construct
VPSEPGGVL

SEQ ID NO: 12192 - protein, 9 aa, synthetic construct
VPSGESAIL

SEQ ID NO: 12193 - protein, 9 aa, synthetic construct
VPSGLIVDY

SEQ ID NO: 12194 - protein, 10 aa, synthetic construct
VPSIDRLRVL

SEQ ID NO: 12195 - protein, 9 aa, synthetic construct
VPSKPPMSL

SEQ ID NO: 12196 - protein, 9 aa, synthetic construct
VPSPYLSSL

SEQ ID NO: 12197 - protein, 9 aa, synthetic construct
VPSTERMVL

SEQ ID NO: 12198 - protein, 9 aa, synthetic construct
VPSVSSSAL

SEQ ID NO: 12199 - protein, 11 aa, synthetic construct
VPSWSKVNQGL

SEQ ID NO: 12200 - protein, 10 aa, synthetic construct
VPTANVSVVD

SEQ ID NO: 12201 - protein, 9 aa, synthetic construct
VPTDEITVY

SEQ ID NO: 12202 - protein, 9 aa, synthetic construct
VPTPIQPTF

SEQ ID NO: 12203 - protein, 9 aa, synthetic construct
VPTRGSLEL

SEQ ID NO: 12204 - protein, 10 aa, synthetic construct
VPTSPKGRLL

SEQ ID NO: 12205 - protein, 9 aa, synthetic construct
VPVDLQHQF

SEQ ID NO: 12206 - protein, 9 aa, synthetic construct
VPVGPHLSL

SEQ ID NO: 12207 - protein, 10 aa, synthetic construct
VPVIGGHAGK

SEQ ID NO: 12208 - protein, 9 aa, synthetic construct
VPVPPNVAF

SEQ ID NO: 12209 - protein, 9 aa, synthetic construct
VPVRDIPAF

SEQ ID NO: 12210 - protein, 11 aa, synthetic construct
VPVSISGPDGY

SEQ ID NO: 12211 - protein, 10 aa, synthetic construct
VPVSVVSDSY

SEQ ID NO: 12212 - protein, 9 aa, synthetic construct
VPVVIADSY

SEQ ID NO: 12213 - protein, 9 aa, synthetic construct
VPVVVIDSY

SEQ ID NO: 12214 - protein, 9 aa, synthetic construct
VPVVNGTSF

SEQ ID NO: 12215 - protein, 8 aa, synthetic construct
VPWLKREL

SEQ ID NO: 12216 - protein, 9 aa, synthetic construct
VPWPPGRSL

SEQ ID NO: 12217 - protein, 9 aa, synthetic construct
VPYEKGFAL

SEQ ID NO: 12218 - protein, 10 aa, synthetic construct
VPYEPDSVVM

SEQ ID NO: 12219 - protein, 9 aa, synthetic construct
VPYGKGPSF

SEQ ID NO: 12220 - protein, 9 aa, synthetic construct
VPYLRVTVM

SEQ ID NO: 12221 - protein, 10 aa, synthetic construct
VPYPDDLVGF

SEQ ID NO: 12222 - protein, 8 aa, synthetic construct
VPYRIFPY

SEQ ID NO: 12223 - protein, 9 aa, synthetic construct
VPYWPEVGM

SEQ ID NO: 12224 - protein, 9 aa, synthetic construct
VPMERELSF

SEQ ID NO: 12225 - protein, 9 aa, synthetic construct
VPMFRNVSL

SEQ ID NO: 12226 - protein, 8 aa, synthetic construct
VQAVIPTI

SEQ ID NO: 12227 - protein, 8 aa, synthetic construct
VQENLYFQ

SEQ ID NO: 12228 - protein, 8 aa, synthetic construct
VQFASQEI

SEQ ID NO: 12229 - protein, 8 aa, synthetic construct
VQFVFDAV

SEQ ID NO: 12230 - protein, 8 aa, synthetic construct
VQFVVRFI

SEQ ID NO: 12231 - protein, 9 aa, synthetic construct
VQGPVGTDF

SEQ ID NO: 12232 - protein, 8 aa, synthetic construct
VQIHILLI

SEQ ID NO: 12233 - protein, 8 aa, synthetic construct
VQIPIMLV

SEQ ID NO: 12234 - protein, 8 aa, synthetic construct
VQIRIKLM

SEQ ID NO: 12235 - protein, 8 aa, synthetic construct
VQKLVVVI

SEQ ID NO: 12236 - protein, 9 aa, synthetic construct
VQKSLQETI

SEQ ID NO: 12237 - protein, 9 aa, synthetic construct
VQLALTANL

SEQ ID NO: 12238 - protein, 8 aa, synthetic construct
VQLETLSI

SEQ ID NO: 12239 - protein, 8 aa, synthetic construct
VQLLIPRI

SEQ ID NO: 12240 - protein, 8 aa, synthetic construct
VQLRLNSI

SEQ ID NO: 12241 - protein, 8 aa, synthetic construct
VQPFASLI

SEQ ID NO: 12242 - protein, 8 aa, synthetic construct
VQQVSLVI

SEQ ID NO: 12243 - protein, 8 aa, synthetic construct
VQQYIRTI

SEQ ID NO: 12244 - protein, 9 aa, synthetic construct
VQRIMVANI

SEQ ID NO: 12245 - protein, 8 aa, synthetic construct
VQRKVICI

SEQ ID NO: 12246 - protein, 8 aa, synthetic construct
VQRLEPVI

SEQ ID NO: 12247 - protein, 8 aa, synthetic construct
VQRLKVAL

SEQ ID NO: 12248 - protein, 9 aa, synthetic construct
VQRTMLELL

SEQ ID NO: 12249 - protein, 8 aa, synthetic construct
VQTCINLI

SEQ ID NO: 12250 - protein, 9 aa, synthetic construct
VQTVLPLVM

SEQ ID NO: 12251 - protein, 8 aa, synthetic construct
VQTVRSRL

SEQ ID NO: 12252 - protein, 9 aa, synthetic construct
VQVPVPVTV

SEQ ID NO: 12253 - protein, 8 aa, synthetic construct
VQVVIPFL

SEQ ID NO: 12254 - protein, 8 aa, synthetic construct
VQYDVELI

SEQ ID NO: 12255 - protein, 9 aa, synthetic construct
VQYEMRTLY

SEQ ID NO: 12256 - protein, 9 aa, synthetic construct
VQYKPQVHI

SEQ ID NO: 12257 - protein, 9 aa, synthetic construct
VQYPYQLYI

SEQ ID NO: 12258 - protein, 8 aa, synthetic construct
VQYQAPQL

SEQ ID NO: 12259 - protein, 9 aa, synthetic construct
VRFKHRYLL

SEQ ID NO: 12260 - protein, 11 aa, synthetic construct
VRFVTGNKILR

SEQ ID NO: 12261 - protein, 9 aa, synthetic construct
VRINLQKEI

SEQ ID NO: 12262 - protein, 11 aa, synthetic construct
VRLLLPGELAK

SEQ ID NO: 12263 - protein, 9 aa, synthetic construct
VRMGYQCTF

SEQ ID NO: 12264 - protein, 11 aa, synthetic construct
VRMNVLADALK

SEQ ID NO: 12265 - protein, 9 aa, synthetic construct
VRNLHIREL

SEQ ID NO: 12266 - protein, 9 aa, synthetic construct
VRNLSTILK

SEQ ID NO: 12267 - protein, 9 aa, synthetic construct
VRNNLRVRL

SEQ ID NO: 12268 - protein, 9 aa, synthetic construct
VRNNVIIVM

SEQ ID NO: 12269 - protein, 9 aa, synthetic construct
VRPLFCALL

SEQ ID NO: 12270 - protein, 9 aa, synthetic construct
VRPPPGPEL

SEQ ID NO: 12271 - protein, 8 aa, synthetic construct
VRPPVQVY

SEQ ID NO: 12272 - protein, 9 aa, synthetic construct
VRSGYYKVL

SEQ ID NO: 12273 - protein, 9 aa, synthetic construct
VRSVHPYEV

SEQ ID NO: 12274 - protein, 9 aa, synthetic construct
VRTHIRVGV

SEQ ID NO: 12275 - protein, 9 aa, synthetic construct
VRTNVTVKL

SEQ ID NO: 12276 - protein, 10 aa, synthetic construct
VRTSIVEKRF

SEQ ID NO: 12277 - protein, 9 aa, synthetic construct
VRVLLGHLL

SEQ ID NO: 12278 - protein, 10 aa, synthetic construct
VRWSPKGTYL

SEQ ID NO: 12279 - protein, 9 aa, synthetic construct
VRYDGIHYL

SEQ ID NO: 12280 - protein, 9 aa, synthetic construct
VSAGIQTSF

SEQ ID NO: 12281 - protein, 10 aa, synthetic construct
VSDNGPCLGY

SEQ ID NO: 12282 - protein, 9 aa, synthetic construct
VSDPSSPQY

SEQ ID NO: 12283 - protein, 10 aa, synthetic construct
VSDPTSGLDF

SEQ ID NO: 12284 - protein, 9 aa, synthetic construct
VSDSKQFTY

SEQ ID NO: 12285 - protein, 8 aa, synthetic construct
VSDSLFVK

SEQ ID NO: 12286 - protein, 9 aa, synthetic construct
VSDTVVEPY

SEQ ID NO: 12287 - protein, 9 aa, synthetic construct
VSEVSSLNY

SEQ ID NO: 12288 - protein, 10 aa, synthetic construct
VSFFPNGYAF

SEQ ID NO: 12289 - protein, 9 aa, synthetic construct
VSFGPHAGK

SEQ ID NO: 12290 - protein, 9 aa, synthetic construct
VSFILRTTI

SEQ ID NO: 12291 - protein, 8 aa, synthetic construct
VSGPIFVL

SEQ ID NO: 12292 - protein, 9 aa, synthetic construct
VSIHSSGFR

SEQ ID NO: 12293 - protein, 9 aa, synthetic construct
VSLDFIRAI

SEQ ID NO: 12294 - protein, 8 aa, synthetic construct
VSLGKVEA

SEQ ID NO: 12295 - protein, 9 aa, synthetic construct
VSPSVLSAL

SEQ ID NO: 12296 - protein, 9 aa, synthetic construct
VSPYSGAVF

SEQ ID NO: 12297 - protein, 9 aa, synthetic construct
VSQLVHSLN

SEQ ID NO: 12298 - protein, 9 aa, synthetic construct
VSTGDVNVE

SEQ ID NO: 12299 - protein, 8 aa, synthetic construct
VSTYIKKI

SEQ ID NO: 12300 - protein, 9 aa, synthetic construct
VSMLNVYLK

SEQ ID NO: 12301 - protein, 9 aa, synthetic construct
VTDGAFFDY

SEQ ID NO: 12302 - protein, 10 aa, synthetic construct
VTDHLGVVYY

SEQ ID NO: 12303 - protein, 9 aa, synthetic construct
VTDLEMPHY

SEQ ID NO: 12304 - protein, 9 aa, synthetic construct
VTDSIRDEY

SEQ ID NO: 12305 - protein, 8 aa, synthetic construct
VTDSPVLL

SEQ ID NO: 12306 - protein, 10 aa, synthetic construct
VTDTGALYLY

SEQ ID NO: 12307 - protein, 9 aa, synthetic construct
VTEEFQPVY

SEQ ID NO: 12308 - protein, 10 aa, synthetic construct
VTEEPQRLFY

SEQ ID NO: 12309 - protein, 9 aa, synthetic construct
VTEIDQDKY

SEQ ID NO: 12310 - protein, 9 aa, synthetic construct
VTEIMSMGY

SEQ ID NO: 12311 - protein, 9 aa, synthetic construct
VTELHVISY

SEQ ID NO: 12312 - protein, 9 aa, synthetic construct
VTEVELLLY

SEQ ID NO: 12313 - protein, 10 aa, synthetic construct
VTFADAHRPK

SEQ ID NO: 12314 - protein, 8 aa, synthetic construct
VTFALHSA

SEQ ID NO: 12315 - protein, 11 aa, synthetic construct
VTFDDHDPVDK

SEQ ID NO: 12316 - protein, 11 aa, synthetic construct
VTFDDHDSVDK

SEQ ID NO: 12317 - protein, 8 aa, synthetic construct
VTFKLTMP

SEQ ID NO: 12318 - protein, 10 aa, synthetic construct
VTIFIRGGNK

SEQ ID NO: 12319 - protein, 10 aa, synthetic construct
VTIIDAPGHR

SEQ ID NO: 12320 - protein, 10 aa, synthetic construct
VTIIMNDYPK

SEQ ID NO: 12321 - protein, 10 aa, synthetic construct
VTIKEGSQLK

SEQ ID NO: 12322 - protein, 11 aa, synthetic construct
VTIKKDVDGAY

SEQ ID NO: 12323 - protein, 8 aa, synthetic construct
VTLEGHTK

SEQ ID NO: 12324 - protein, 10 aa, synthetic construct
VTLSWKPVQK

SEQ ID NO: 12325 - protein, 9 aa, synthetic construct
VTPNCRVAL

SEQ ID NO: 12326 - protein, 11 aa, synthetic construct
VTVGVDGTLYK

SEQ ID NO: 12327 - protein, 9 aa, synthetic construct
VTVPPGPSL

SEQ ID NO: 12328 - protein, 9 aa, synthetic construct
VVAAVIWRK

SEQ ID NO: 12329 - protein, 9 aa, synthetic construct
VVAEELENV

SEQ ID NO: 12330 - protein, 8 aa, synthetic construct
VVAGTNYY

SEQ ID NO: 12331 - protein, 9 aa, synthetic construct
VVAPITTGY

SEQ ID NO: 12332 - protein, 10 aa, synthetic construct
VVARGAQALL

SEQ ID NO: 12333 - protein, 9 aa, synthetic construct
VVCEYIVKK

SEQ ID NO: 12334 - protein, 9 aa, synthetic construct
VVDAIPVFL

SEQ ID NO: 12335 - protein, 9 aa, synthetic construct
VVDDWIESY

SEQ ID NO: 12336 - protein, 10 aa, synthetic construct
VVDEDHELIY

SEQ ID NO: 12337 - protein, 9 aa, synthetic construct
VVDEIFNEY

SEQ ID NO: 12338 - protein, 9 aa, synthetic construct
VVDGFNVLY

SEQ ID NO: 12339 - protein, 8 aa, synthetic construct
VVDLMAHM

SEQ ID NO: 12340 - protein, 9 aa, synthetic construct
VVDLMAHMA

SEQ ID NO: 12341 - protein, 9 aa, synthetic construct
VVGAVVFQK

SEQ ID NO: 12342 - protein, 8 aa, synthetic construct
VVGTGTSL

SEQ ID NO: 12343 - protein, 10 aa, synthetic construct
VVHGEDAVPY

SEQ ID NO: 12344 - protein, 9 aa, synthetic construct
VVIGGTSML

SEQ ID NO: 12345 - protein, 9 aa, synthetic construct
VVKNVGLTL

SEQ ID NO: 12346 - protein, 9 aa, synthetic construct
VVKPPGSSL

SEQ ID NO: 12347 - protein, 10 aa, synthetic construct
VVLGQFLVLK

SEQ ID NO: 12348 - protein, 9 aa, synthetic construct
VVLPAPPAV

SEQ ID NO: 12349 - protein, 9 aa, synthetic construct
VVNGRVLEL

SEQ ID NO: 12350 - protein, 10 aa, synthetic construct
VVPKAAIVAR

SEQ ID NO: 12351 - protein, 10 aa, synthetic construct
VVQEPGQVFK

SEQ ID NO: 12352 - protein, 9 aa, synthetic construct
VVSRIRAAL

SEQ ID NO: 12353 - protein, 10 aa, synthetic construct
VVTAYPTFAT

SEQ ID NO: 12354 - protein, 9 aa, synthetic construct
VVTLEGHTK

SEQ ID NO: 12355 - protein, 10 aa, synthetic construct
VVYTSHLQLK

SEQ ID NO: 12356 - protein, 10 aa, synthetic construct
VVYVGGILTK

SEQ ID NO: 12357 - protein, 10 aa, synthetic construct
VWLEEELKTF

SEQ ID NO: 12358 - protein, 9 aa, synthetic construct
VYAPFIEKL

SEQ ID NO: 12359 - protein, 10 aa, synthetic construct
VYAVIPAEKF

SEQ ID NO: 12360 - protein, 10 aa, synthetic construct
VYCPDCAKKL

SEQ ID NO: 12361 - protein, 10 aa, synthetic construct
VYCTVCATHL

SEQ ID NO: 12362 - protein, 9 aa, synthetic construct
VYDIAQVNL

SEQ ID NO: 12363 - protein, 9 aa, synthetic construct
VYDLSIRGF

SEQ ID NO: 12364 - protein, 10 aa, synthetic construct
VYDSSEKTHF

SEQ ID NO: 12365 - protein, 9 aa, synthetic construct
VYDTNPAKF

SEQ ID NO: 12366 - protein, 10 aa, synthetic construct
VYDVTNEESF

SEQ ID NO: 12367 - protein, 9 aa, synthetic construct
VYEYVVERF

SEQ ID NO: 12368 - protein, 10 aa, synthetic construct
VYFPDQHINF

SEQ ID NO: 12369 - protein, 9 aa, synthetic construct
VYGPLPQSF

SEQ ID NO: 12370 - protein, 9 aa, synthetic construct
VYIEAAIRF

SEQ ID NO: 12371 - protein, 9 aa, synthetic construct
VYIKHPVSL

SEQ ID NO: 12372 - protein, 9 aa, synthetic construct
VYINTAQEF

SEQ ID NO: 12373 - protein, 9 aa, synthetic construct
VYIPSKTDL

SEQ ID NO: 12374 - protein, 9 aa, synthetic construct
VYISEHEHF

SEQ ID NO: 12375 - protein, 9 aa, synthetic construct
VYISNGQVL

SEQ ID NO: 12376 - protein, 8 aa, synthetic construct
VYKEEHPF

SEQ ID NO: 12377 - protein, 8 aa, synthetic construct
VYKNFPQL

SEQ ID NO: 12378 - protein, 9 aa, synthetic construct
VYLDKFIRL

SEQ ID NO: 12379 - protein, 9 aa, synthetic construct
VYLHDFQRF

SEQ ID NO: 12380 - protein, 9 aa, synthetic construct
VYMDWYEKF

SEQ ID NO: 12381 - protein, 10 aa, synthetic construct
VYNENLVHMI

SEQ ID NO: 12382 - protein, 9 aa, synthetic construct
VYNPVIYVF

SEQ ID NO: 12383 - protein, 9 aa, synthetic construct
VYPERTPLL

SEQ ID NO: 12384 - protein, 9 aa, synthetic construct
VYPGLAVFF

SEQ ID NO: 12385 - protein, 9 aa, synthetic construct
VYPLYTIVF

SEQ ID NO: 12386 - protein, 11 aa, synthetic construct
VYPPIQVHVTL

SEQ ID NO: 12387 - protein, 9 aa, synthetic construct
VYQHLFTRI

SEQ ID NO: 12388 - protein, 9 aa, synthetic construct
VYRTVIEYY

SEQ ID NO: 12389 - protein, 9 aa, synthetic construct
VYSFVTPTF

SEQ ID NO: 12390 - protein, 9 aa, synthetic construct
VYSLQQFGF

SEQ ID NO: 12391 - protein, 9 aa, synthetic construct
VYSNSIYEL

SEQ ID NO: 12392 - protein, 9 aa, synthetic construct
VYSPHVLNL

SEQ ID NO: 12393 - protein, 9 aa, synthetic construct
VYSQILRKL

SEQ ID NO: 12394 - protein, 9 aa, synthetic construct
VYTDFAFRI

SEQ ID NO: 12395 - protein, 9 aa, synthetic construct
VYVAIQAVL

SEQ ID NO: 12396 - protein, 9 aa, synthetic construct
VYVVGTAHF

SEQ ID NO: 12397 - protein, 9 aa, synthetic construct
VMAGDIYSV

SEQ ID NO: 12398 - protein, 8 aa, synthetic construct
VMAPRTVL

SEQ ID NO: 12399 - protein, 8 aa, synthetic construct
VMDSPVHL

SEQ ID NO: 12400 - protein, 9 aa, synthetic construct
VMEKSFLEY

SEQ ID NO: 12401 - protein, 10 aa, synthetic construct
VMGNNPADLL

SEQ ID NO: 12402 - protein, 9 aa, synthetic construct
VMKKIIETV

SEQ ID NO: 12403 - protein, 8 aa, synthetic construct
VMKTEPSI

SEQ ID NO: 12404 - protein, 9 aa, synthetic construct
VMLDVPIRL

SEQ ID NO: 12405 - protein, 9 aa, synthetic construct
VMLEMTPEL

SEQ ID NO: 12406 - protein, 8 aa, synthetic construct
VMLHALLI

SEQ ID NO: 12407 - protein, 8 aa, synthetic construct
VMLKAIRI

SEQ ID NO: 12408 - protein, 8 aa, synthetic construct
VMNIRTVL

SEQ ID NO: 12409 - protein, 9 aa, synthetic construct
VMRIMDPEI

SEQ ID NO: 12410 - protein, 8 aa, synthetic construct
VMSVGFLL

SEQ ID NO: 12411 - protein, 9 aa, synthetic construct
VMTLVSTYL

SEQ ID NO: 12412 - protein, 9 aa, synthetic construct
VMVGELVGA

SEQ ID NO: 12413 - protein, 9 aa, synthetic construct
VMYDLITEL

SEQ ID NO: 12414 - protein, 9 aa, synthetic construct
VMYGKVYRI

SEQ ID NO: 12415 - protein, 9 aa, synthetic construct
WAAEDIINY

SEQ ID NO: 12416 - protein, 9 aa, synthetic construct
WEDEGVRAC

SEQ ID NO: 12417 - protein, 9 aa, synthetic construct
WEIENNPTV

SEQ ID NO: 12418 - protein, 9 aa, synthetic construct
WENISRPEA

SEQ ID NO: 12419 - protein, 9 aa, synthetic construct
WEVVPEPVA

SEQ ID NO: 12420 - protein, 9 aa, synthetic construct
WEYYKHPIS

SEQ ID NO: 12421 - protein, 9 aa, synthetic construct
WFDGKLVTV

SEQ ID NO: 12422 - protein, 9 aa, synthetic construct
WIHVKPERL

SEQ ID NO: 12423 - protein, 9 aa, synthetic construct
WIKEKIYVL

SEQ ID NO: 12424 - protein, 9 aa, synthetic construct
WINEKEAAL

SEQ ID NO: 12425 - protein, 9 aa, synthetic construct
WIREKTKVI

SEQ ID NO: 12426 - protein, 8 aa, synthetic construct
WLEEVSQV

SEQ ID NO: 12427 - protein, 8 aa, synthetic construct
WPGDILAY

SEQ ID NO: 12428 - protein, 10 aa, synthetic construct
WPKDVGIVAL

SEQ ID NO: 12429 - protein, 8 aa, synthetic construct
WPLTQVTF

SEQ ID NO: 12430 - protein, 10 aa, synthetic construct
WPQDEYIVEY

SEQ ID NO: 12431 - protein, 11 aa, synthetic construct
WPSGTECIAKY

SEQ ID NO: 12432 - protein, 10 aa, synthetic construct
WPYAETPEAL

SEQ ID NO: 12433 - protein, 9 aa, synthetic construct
WQRLKGLAL

SEQ ID NO: 12434 - protein, 11 aa, synthetic construct
WRKKQSDVMRF

SEQ ID NO: 12435 - protein, 9 aa, synthetic construct
WRNPNTETY

SEQ ID NO: 12436 - protein, 9 aa, synthetic construct
WRYMGGFAK

SEQ ID NO: 12437 - protein, 9 aa, synthetic construct
WSDGHLIYY

SEQ ID NO: 12438 - protein, 9 aa, synthetic construct
WTDGSTLQY

SEQ ID NO: 12439 - protein, 9 aa, synthetic construct
WTDINVVVY

SEQ ID NO: 12440 - protein, 9 aa, synthetic construct
WVDEERASL

SEQ ID NO: 12441 - protein, 9 aa, synthetic construct
WVDETLSSV

SEQ ID NO: 12442 - protein, 9 aa, synthetic construct
WVKEKVVAL

SEQ ID NO: 12443 - protein, 9 aa, synthetic construct
WVRDSPASL

SEQ ID NO: 12444 - protein, 9 aa, synthetic construct
WVRPDLGEL

SEQ ID NO: 12445 - protein, 9 aa, synthetic construct
WMAEQKISY

SEQ ID NO: 12446 - protein, 9 aa, synthetic construct
WMHKVPASL

SEQ ID NO: 12447 - protein, 8 aa, synthetic construct
WMLDILKI

SEQ ID NO: 12448 - protein, 10 aa, synthetic construct
YAAELAGLSY

SEQ ID NO: 12449 - protein, 10 aa, synthetic construct
YAAPHPLQSY

SEQ ID NO: 12450 - protein, 9 aa, synthetic construct
YAAQENLEY

SEQ ID NO: 12451 - protein, 9 aa, synthetic construct
YAAVESEEF

SEQ ID NO: 12452 - protein, 10 aa, synthetic construct
YACGECGKAF

SEQ ID NO: 12453 - protein, 10 aa, synthetic construct
YACRVNHVTL

SEQ ID NO: 12454 - protein, 10 aa, synthetic construct
YADGESFLGY

SEQ ID NO: 12455 - protein, 9 aa, synthetic construct
YADPGVSFY

SEQ ID NO: 12456 - protein, 9 aa, synthetic construct
YADPVNAHY

SEQ ID NO: 12457 - protein, 9 aa, synthetic construct
YADVGGKQF

SEQ ID NO: 12458 - protein, 8 aa, synthetic construct
YAEVGRVL

SEQ ID NO: 12459 - protein, 8 aa, synthetic construct
YAFLHRTL

SEQ ID NO: 12460 - protein, 9 aa, synthetic construct
YAFLMVDRY

SEQ ID NO: 12461 - protein, 9 aa, synthetic construct
YAFPKEFPY

SEQ ID NO: 12462 - protein, 9 aa, synthetic construct
YAFPYIILV

SEQ ID NO: 12463 - protein, 10 aa, synthetic construct
YAFQDDRYLY

SEQ ID NO: 12464 - protein, 9 aa, synthetic construct
YAFSHQEGF

SEQ ID NO: 12465 - protein, 9 aa, synthetic construct
YAFVRPVIL

SEQ ID NO: 12466 - protein, 9 aa, synthetic construct
YAIEVDPVL

SEQ ID NO: 12467 - protein, 9 aa, synthetic construct
YAIGLVMRL

SEQ ID NO: 12468 - protein, 9 aa, synthetic construct
YAKKRGWVL

SEQ ID NO: 12469 - protein, 8 aa, synthetic construct
YAKLLHRY

SEQ ID NO: 12470 - protein, 9 aa, synthetic construct
YAKNNIPII

SEQ ID NO: 12471 - protein, 9 aa, synthetic construct
YALAGGISF

SEQ ID NO: 12472 - protein, 10 aa, synthetic construct
YALDRMQFGV

SEQ ID NO: 12473 - protein, 9 aa, synthetic construct
YALGERQSY

SEQ ID NO: 12474 - protein, 9 aa, synthetic construct
YALPHAILR

SEQ ID NO: 12475 - protein, 8 aa, synthetic construct
YALQVHCY

SEQ ID NO: 12476 - protein, 9 aa, synthetic construct
YANAKIYKL

SEQ ID NO: 12477 - protein, 9 aa, synthetic construct
YANEVGEAF

SEQ ID NO: 12478 - protein, 9 aa, synthetic construct
YAPNRTITV

SEQ ID NO: 12479 - protein, 9 aa, synthetic construct
YAPPSLAAP

SEQ ID NO: 12480 - protein, 10 aa, synthetic construct
YAQDEHLITF

SEQ ID NO: 12481 - protein, 9 aa, synthetic construct
YARDDLSLY

SEQ ID NO: 12482 - protein, 9 aa, synthetic construct
YARLHPRAV

SEQ ID NO: 12483 - protein, 9 aa, synthetic construct
YARSVHEEF

SEQ ID NO: 12484 - protein, 9 aa, synthetic construct
YASSPGGVY

SEQ ID NO: 12485 - protein, 9 aa, synthetic construct
YATFIVTNY

SEQ ID NO: 12486 - protein, 10 aa, synthetic construct
YAVEGRDLTL

SEQ ID NO: 12487 - protein, 10 aa, synthetic construct
YAVELVNDSL

SEQ ID NO: 12488 - protein, 11 aa, synthetic construct
YAWESSAGGSF

SEQ ID NO: 12489 - protein, 8 aa, synthetic construct
YAWGQTGL

SEQ ID NO: 12490 - protein, 9 aa, synthetic construct
YAYDGKDYI

SEQ ID NO: 12491 - protein, 11 aa, synthetic construct
YAYDGKDYIAL

SEQ ID NO: 12492 - protein, 8 aa, synthetic construct
YAYRHPLI

SEQ ID NO: 12493 - protein, 9 aa, synthetic construct
YCAEIAHNV

SEQ ID NO: 12494 - protein, 9 aa, synthetic construct
YCCPEMVEY

SEQ ID NO: 12495 - protein, 9 aa, synthetic construct
YCPGMGVAL

SEQ ID NO: 12496 - protein, 8 aa, synthetic construct
YCPTGEWL

SEQ ID NO: 12497 - protein, 9 aa, synthetic construct
YCPYSTQNL

SEQ ID NO: 12498 - protein, 9 aa, synthetic construct
YCTDVSADF

SEQ ID NO: 12499 - protein, 9 aa, synthetic construct
YCYDNIHFM

SEQ ID NO: 12500 - protein, 9 aa, synthetic construct
YCYVTVVSL

SEQ ID NO: 12501 - protein, 9 aa, synthetic construct
YDAEISQIH

SEQ ID NO: 12502 - protein, 11 aa, synthetic construct
YDAEISQIHQS

SEQ ID NO: 12503 - protein, 8 aa, synthetic construct
YDDKVSAL

SEQ ID NO: 12504 - protein, 8 aa, synthetic construct
YDECLRKY

SEQ ID NO: 12505 - protein, 9 aa, synthetic construct
YDGKDYIAL

SEQ ID NO: 12506 - protein, 11 aa, synthetic construct
YDGNHIPGSPL

SEQ ID NO: 12507 - protein, 8 aa, synthetic construct
YDLVTEKM

SEQ ID NO: 12508 - protein, 8 aa, synthetic construct
YDNFFQHL

SEQ ID NO: 12509 - protein, 8 aa, synthetic construct
YDPEAASA

SEQ ID NO: 12510 - protein, 9 aa, synthetic construct
YDPEAASAP

SEQ ID NO: 12511 - protein, 10 aa, synthetic construct
YDPEAASAPG

SEQ ID NO: 12512 - protein, 8 aa, synthetic construct
YDYILPQV

SEQ ID NO: 12513 - protein, 8 aa, synthetic construct
YDYLHLSR

SEQ ID NO: 12514 - protein, 9 aa, synthetic construct
YEAPGVREA

SEQ ID NO: 12515 - protein, 9 aa, synthetic construct
YEAVLLQTP

SEQ ID NO: 12516 - protein, 10 aa, synthetic construct
YEAVVSGTKV

SEQ ID NO: 12517 - protein, 8 aa, synthetic construct
YEDIAQKS

SEQ ID NO: 12518 - protein, 11 aa, synthetic construct
YEDIAQKSKAE

SEQ ID NO: 12519 - protein, 9 aa, synthetic construct
YEDSGIPLP

SEQ ID NO: 12520 - protein, 8 aa, synthetic construct
YEEIAQRS

SEQ ID NO: 12521 - protein, 9 aa, synthetic construct
YEFCPFHNV

SEQ ID NO: 12522 - protein, 9 aa, synthetic construct
YEFKFPNRL

SEQ ID NO: 12523 - protein, 11 aa, synthetic construct
YEFKGHSLLQA

SEQ ID NO: 12524 - protein, 9 aa, synthetic construct
YEFSQRLEA

SEQ ID NO: 12525 - protein, 9 aa, synthetic construct
YEFVAGVSA

SEQ ID NO: 12526 - protein, 9 aa, synthetic construct
YEIDKTLGI

SEQ ID NO: 12527 - protein, 10 aa, synthetic construct
YEIEKRLSTA

SEQ ID NO: 12528 - protein, 9 aa, synthetic construct
YEIKQFLEC

SEQ ID NO: 12529 - protein, 9 aa, synthetic construct
YEILRLLVT

SEQ ID NO: 12530 - protein, 11 aa, synthetic construct
YEIPGLEPITF

SEQ ID NO: 12531 - protein, 9 aa, synthetic construct
YEIPSNLTP

SEQ ID NO: 12532 - protein, 9 aa, synthetic construct
YEKFGTIRA

SEQ ID NO: 12533 - protein, 8 aa, synthetic construct
YEKLKTEL

SEQ ID NO: 12534 - protein, 10 aa, synthetic construct
YEKTPFDQLA

SEQ ID NO: 12535 - protein, 10 aa, synthetic construct
YELDLGLNHV

SEQ ID NO: 12536 - protein, 11 aa, synthetic construct
YELDLGLNHVV

SEQ ID NO: 12537 - protein, 9 aa, synthetic construct
YELEHLSTP

SEQ ID NO: 12538 - protein, 9 aa, synthetic construct
YELIDQDAR

SEQ ID NO: 12539 - protein, 9 aa, synthetic construct
YELLFKEGV

SEQ ID NO: 12540 - protein, 9 aa, synthetic construct
YELTYFLEA

SEQ ID NO: 12541 - protein, 9 aa, synthetic construct
YEMPDFDVA

SEQ ID NO: 12542 - protein, 9 aa, synthetic construct
YENEVALRQ

SEQ ID NO: 12543 - protein, 9 aa, synthetic construct
YEQLSSEAL

SEQ ID NO: 12544 - protein, 9 aa, synthetic construct
YEREQVIAA

SEQ ID NO: 12545 - protein, 9 aa, synthetic construct
YETLTITQA

SEQ ID NO: 12546 - protein, 9 aa, synthetic construct
YEVIYLTEP

SEQ ID NO: 12547 - protein, 9 aa, synthetic construct
YEVNFQNGI

SEQ ID NO: 12548 - protein, 10 aa, synthetic construct
YEVRLTQTVA

SEQ ID NO: 12549 - protein, 9 aa, synthetic construct
YEYDFERGR

SEQ ID NO: 12550 - protein, 10 aa, synthetic construct
YEYKFGFELP

SEQ ID NO: 12551 - protein, 8 aa, synthetic construct
YEYQPLQI

SEQ ID NO: 12552 - protein, 9 aa, synthetic construct
YEYRHVMLP

SEQ ID NO: 12553 - protein, 9 aa, synthetic construct
YEYSWVQGP

SEQ ID NO: 12554 - protein, 8 aa, synthetic construct
YEYMAAYI

SEQ ID NO: 12555 - protein, 10 aa, synthetic construct
YEMIFRGTGA

SEQ ID NO: 12556 - protein, 9 aa, synthetic construct
YFDAIPVTM

SEQ ID NO: 12557 - protein, 9 aa, synthetic construct
YFDDSNVSL

SEQ ID NO: 12558 - protein, 9 aa, synthetic construct
YFDPANGKF

SEQ ID NO: 12559 - protein, 10 aa, synthetic construct
YFDPLRNEYF

SEQ ID NO: 12560 - protein, 9 aa, synthetic construct
YFDSGDYNM

SEQ ID NO: 12561 - protein, 9 aa, synthetic construct
YFDVEPAQV

SEQ ID NO: 12562 - protein, 9 aa, synthetic construct
YFDVSHEHL

SEQ ID NO: 12563 - protein, 10 aa, synthetic construct
YFGYTMIMVL

SEQ ID NO: 12564 - protein, 9 aa, synthetic construct
YFHIGETEK

SEQ ID NO: 12565 - protein, 9 aa, synthetic construct
YFLDKIDVI

SEQ ID NO: 12566 - protein, 9 aa, synthetic construct
YFPDKVALL

SEQ ID NO: 12567 - protein, 10 aa, synthetic construct
YFPKKEAVTF

SEQ ID NO: 12568 - protein, 9 aa, synthetic construct
YFTNANREL

SEQ ID NO: 12569 - protein, 10 aa, synthetic construct
YGFGSGDDPY

SEQ ID NO: 12570 - protein, 9 aa, synthetic construct
YGFSDPLTF

SEQ ID NO: 12571 - protein, 11 aa, synthetic construct
YGFYDECQTKY

SEQ ID NO: 12572 - protein, 11 aa, synthetic construct
YGGLGGFGGGS

SEQ ID NO: 12573 - protein, 9 aa, synthetic construct
YGGLTGLNK

SEQ ID NO: 12574 - protein, 9 aa, synthetic construct
YGKIAVMEL

SEQ ID NO: 12575 - protein, 10 aa, synthetic construct
YGLAAAVFTK

SEQ ID NO: 12576 - protein, 9 aa, synthetic construct
YGLLDPSVF

SEQ ID NO: 12577 - protein, 10 aa, synthetic construct
YGLVEGQVKT

SEQ ID NO: 12578 - protein, 8 aa, synthetic construct
YGVDVTAR

SEQ ID NO: 12579 - protein, 8 aa, synthetic construct
YGYIRTVL

SEQ ID NO: 12580 - protein, 9 aa, synthetic construct
YGYVRAEVL

SEQ ID NO: 12581 - protein, 8 aa, synthetic construct
YGMPRQIL

SEQ ID NO: 12582 - protein, 9 aa, synthetic construct
YHKYSLIKG

SEQ ID NO: 12583 - protein, 8 aa, synthetic construct
YHPNIDEK

SEQ ID NO: 12584 - protein, 8 aa, synthetic construct
YHSKYEEL

SEQ ID NO: 12585 - protein, 9 aa, synthetic construct
YIADHLDHF

SEQ ID NO: 12586 - protein, 9 aa, synthetic construct
YIDAQFEAY

SEQ ID NO: 12587 - protein, 9 aa, synthetic construct
YIDDIFSGV

SEQ ID NO: 12588 - protein, 9 aa, synthetic construct
YIDDTLTMV

SEQ ID NO: 12589 - protein, 9 aa, synthetic construct
YIDEQFERY

SEQ ID NO: 12590 - protein, 8 aa, synthetic construct
YIDKVRFL

SEQ ID NO: 12591 - protein, 9 aa, synthetic construct
YIDPIAMEY

SEQ ID NO: 12592 - protein, 8 aa, synthetic construct
YIDQKFVL

SEQ ID NO: 12593 - protein, 9 aa, synthetic construct
YIDSKFEDY

SEQ ID NO: 12594 - protein, 9 aa, synthetic construct
YIHGRLQSL

SEQ ID NO: 12595 - protein, 9 aa, synthetic construct
YIIDYYGTR

SEQ ID NO: 12596 - protein, 9 aa, synthetic construct
YIIKDKHIL

SEQ ID NO: 12597 - protein, 8 aa, synthetic construct
YIKHPHLF

SEQ ID NO: 12598 - protein, 8 aa, synthetic construct
YIKHPVSL

SEQ ID NO: 12599 - protein, 8 aa, synthetic construct
YIKNKLVF

SEQ ID NO: 12600 - protein, 9 aa, synthetic construct
YIKPREKVL

SEQ ID NO: 12601 - protein, 8 aa, synthetic construct
YIKQIKTF

SEQ ID NO: 12602 - protein, 8 aa, synthetic construct
YILPKNVL

SEQ ID NO: 12603 - protein, 9 aa, synthetic construct
YINEKNVAL

SEQ ID NO: 12604 - protein, 9 aa, synthetic construct
YIPEITSVL

SEQ ID NO: 12605 - protein, 8 aa, synthetic construct
YISEHEHF

SEQ ID NO: 12606 - protein, 8 aa, synthetic construct
YIVHDEVK

SEQ ID NO: 12607 - protein, 9 aa, synthetic construct
YIVPLVVVY

SEQ ID NO: 12608 - protein, 10 aa, synthetic construct
YIYDGELVSK

SEQ ID NO: 12609 - protein, 9 aa, synthetic construct
YKIAFPYLY

SEQ ID NO: 12610 - protein, 9 aa, synthetic construct
YKIPYTTVL

SEQ ID NO: 12611 - protein, 8 aa, synthetic construct
YKNVKFVL

SEQ ID NO: 12612 - protein, 8 aa, synthetic construct
YKSPVILL

SEQ ID NO: 12613 - protein, 10 aa, synthetic construct
YKTIDDLKNQ

SEQ ID NO: 12614 - protein, 11 aa, synthetic construct
YKTIDDLKNQI

SEQ ID NO: 12615 - protein, 9 aa, synthetic construct
YKVEYPIMY

SEQ ID NO: 12616 - protein, 9 aa, synthetic construct
YKYPFELIM

SEQ ID NO: 12617 - protein, 9 aa, synthetic construct
YLADVTNAL

SEQ ID NO: 12618 - protein, 9 aa, synthetic construct
YLAGEAPTL

SEQ ID NO: 12619 - protein, 9 aa, synthetic construct
YLAPHVRTL

SEQ ID NO: 12620 - protein, 9 aa, synthetic construct
YLDASLITV

SEQ ID NO: 12621 - protein, 9 aa, synthetic construct
YLDEYIARM

SEQ ID NO: 12622 - protein, 8 aa, synthetic construct
YLDKFIRL

SEQ ID NO: 12623 - protein, 9 aa, synthetic construct
YLDKGILKY

SEQ ID NO: 12624 - protein, 8 aa, synthetic construct
YLDKVRAL

SEQ ID NO: 12625 - protein, 9 aa, synthetic construct
YLDNGVVFV

SEQ ID NO: 12626 - protein, 10 aa, synthetic construct
YLDNVIGHSY

SEQ ID NO: 12627 - protein, 9 aa, synthetic construct
YLDPAQRGV

SEQ ID NO: 12628 - protein, 9 aa, synthetic construct
YLDPVQRDL

SEQ ID NO: 12629 - protein, 9 aa, synthetic construct
YLDQMEDLY

SEQ ID NO: 12630 - protein, 9 aa, synthetic construct
YLEETSIRY

SEQ ID NO: 12631 - protein, 9 aa, synthetic construct
YLEQLHQLY

SEQ ID NO: 12632 - protein, 9 aa, synthetic construct
YLFELANSI

SEQ ID NO: 12633 - protein, 9 aa, synthetic construct
YLFERIKEL

SEQ ID NO: 12634 - protein, 9 aa, synthetic construct
YLFLGGILM

SEQ ID NO: 12635 - protein, 9 aa, synthetic construct
YLGAKPRSL

SEQ ID NO: 12636 - protein, 9 aa, synthetic construct
YLHDFLKYL

SEQ ID NO: 12637 - protein, 8 aa, synthetic construct
YLHDFQRF

SEQ ID NO: 12638 - protein, 11 aa, synthetic construct
YLHDQNPDAAL

SEQ ID NO: 12639 - protein, 9 aa, synthetic construct
YLHIQMHLV

SEQ ID NO: 12640 - protein, 9 aa, synthetic construct
YLHSQVVSV

SEQ ID NO: 12641 - protein, 9 aa, synthetic construct
YLINEIDRI

SEQ ID NO: 12642 - protein, 9 aa, synthetic construct
YLKDLIEEV

SEQ ID NO: 12643 - protein, 9 aa, synthetic construct
YLKHRLIVV

SEQ ID NO: 12644 - protein, 8 aa, synthetic construct
YLKRKRIF

SEQ ID NO: 12645 - protein, 9 aa, synthetic construct
YLKVKGNVF

SEQ ID NO: 12646 - protein, 9 aa, synthetic construct
YLKVRPDEI

SEQ ID NO: 12647 - protein, 9 aa, synthetic construct
YLLDLHSYL

SEQ ID NO: 12648 - protein, 10 aa, synthetic construct
YLLKLTSQKK

SEQ ID NO: 12649 - protein, 9 aa, synthetic construct
YLLPAIVHI

SEQ ID NO: 12650 - protein, 9 aa, synthetic construct
YLLPSVVLL

SEQ ID NO: 12651 - protein, 9 aa, synthetic construct
YLNDGLWHM

SEQ ID NO: 12652 - protein, 9 aa, synthetic construct
YLNDLIHSV

SEQ ID NO: 12653 - protein, 10 aa, synthetic construct
YLPDFRFTPF

SEQ ID NO: 12654 - protein, 9 aa, synthetic construct
YLPEELAAL

SEQ ID NO: 12655 - protein, 10 aa, synthetic construct
YLPENKPCYL

SEQ ID NO: 12656 - protein, 9 aa, synthetic construct
YLPPGFLSA

SEQ ID NO: 12657 - protein, 9 aa, synthetic construct
YLRELLTTM

SEQ ID NO: 12658 - protein, 9 aa, synthetic construct
YLSEATIGL

SEQ ID NO: 12659 - protein, 9 aa, synthetic construct
YLSEEVQAV

SEQ ID NO: 12660 - protein, 9 aa, synthetic construct
YLSNVDVYL

SEQ ID NO: 12661 - protein, 9 aa, synthetic construct
YLSTCIDQV

SEQ ID NO: 12662 - protein, 9 aa, synthetic construct
YLTAEILEL

SEQ ID NO: 12663 - protein, 10 aa, synthetic construct
YLTGNNISYI

SEQ ID NO: 12664 - protein, 11 aa, synthetic construct
YLTNEGIQYLR

SEQ ID NO: 12665 - protein, 9 aa, synthetic construct
YLTPLILTL

SEQ ID NO: 12666 - protein, 9 aa, synthetic construct
YLVPELDGV

SEQ ID NO: 12667 - protein, 9 aa, synthetic construct
YLVVKIEKV

SEQ ID NO: 12668 - protein, 9 aa, synthetic construct
YLYDLNHTL

SEQ ID NO: 12669 - protein, 9 aa, synthetic construct
YMFVDENTF

SEQ ID NO: 12670 - protein, 10 aa, synthetic construct
YMIDPSGVSY

SEQ ID NO: 12671 - protein, 8 aa, synthetic construct
YNDEDIYL

SEQ ID NO: 12672 - protein, 8 aa, synthetic construct
YNKLRNLL

SEQ ID NO: 12673 - protein, 9 aa, synthetic construct
YPAAPLPGF

SEQ ID NO: 12674 - protein, 9 aa, synthetic construct
YPAAVPQAL

SEQ ID NO: 12675 - protein, 9 aa, synthetic construct
YPADFNIQY

SEQ ID NO: 12676 - protein, 9 aa, synthetic construct
YPADKISIL

SEQ ID NO: 12677 - protein, 9 aa, synthetic construct
YPAEITLTW

SEQ ID NO: 12678 - protein, 10 aa, synthetic construct
YPAPERLQEY

SEQ ID NO: 12679 - protein, 9 aa, synthetic construct
YPAPYLDEY

SEQ ID NO: 12680 - protein, 9 aa, synthetic construct
YPASAGTSL

SEQ ID NO: 12681 - protein, 9 aa, synthetic construct
YPASTVQIL

SEQ ID NO: 12682 - protein, 10 aa, synthetic construct
YPATGADVAF

SEQ ID NO: 12683 - protein, 9 aa, synthetic construct
YPDATPEEL

SEQ ID NO: 12684 - protein, 9 aa, synthetic construct
YPDERTALY

SEQ ID NO: 12685 - protein, 9 aa, synthetic construct
YPDEVRGVF

SEQ ID NO: 12686 - protein, 9 aa, synthetic construct
YPDPRGAPW

SEQ ID NO: 12687 - protein, 9 aa, synthetic construct
YPDRIMNTF

SEQ ID NO: 12688 - protein, 9 aa, synthetic construct
YPDSPSACL

SEQ ID NO: 12689 - protein, 9 aa, synthetic construct
YPDTDVILM

SEQ ID NO: 12690 - protein, 9 aa, synthetic construct
YPEAVYVVY

SEQ ID NO: 12691 - protein, 9 aa, synthetic construct
YPEDVSEEL

SEQ ID NO: 12692 - protein, 9 aa, synthetic construct
YPEEDYESF

SEQ ID NO: 12693 - protein, 9 aa, synthetic construct
YPEELKPVL

SEQ ID NO: 12694 - protein, 10 aa, synthetic construct
YPEEVSSMVL

SEQ ID NO: 12695 - protein, 10 aa, synthetic construct
YPEGLGEVLY

SEQ ID NO: 12696 - protein, 11 aa, synthetic construct
YPETLVNLIVL

SEQ ID NO: 12697 - protein, 10 aa, synthetic construct
YPFAPLILLY

SEQ ID NO: 12698 - protein, 9 aa, synthetic construct
YPFFRGVTI

SEQ ID NO: 12699 - protein, 8 aa, synthetic construct
YPFGIVGM

SEQ ID NO: 12700 - protein, 10 aa, synthetic construct
YPFHKQPPTY

SEQ ID NO: 12701 - protein, 9 aa, synthetic construct
YPFKDVNNW

SEQ ID NO: 12702 - protein, 10 aa, synthetic construct
YPFKPPKITF

SEQ ID NO: 12703 - protein, 10 aa, synthetic construct
YPFKPPKVAF

SEQ ID NO: 12704 - protein, 10 aa, synthetic construct
YPFKPPKVTF

SEQ ID NO: 12705 - protein, 10 aa, synthetic construct
YPFKSPSIGF

SEQ ID NO: 12706 - protein, 11 aa, synthetic construct
YPFNAKQPTDM

SEQ ID NO: 12707 - protein, 8 aa, synthetic construct
YPFPVTLY

SEQ ID NO: 12708 - protein, 8 aa, synthetic construct
YPGITEEL

SEQ ID NO: 12709 - protein, 9 aa, synthetic construct
YPGQPHPAL

SEQ ID NO: 12710 - protein, 9 aa, synthetic construct
YPHSPGQVI

SEQ ID NO: 12711 - protein, 10 aa, synthetic construct
YPIEHGIITN

SEQ ID NO: 12712 - protein, 9 aa, synthetic construct
YPITLFVEK

SEQ ID NO: 12713 - protein, 9 aa, synthetic construct
YPITLYLEK

SEQ ID NO: 12714 - protein, 9 aa, synthetic construct
YPKFKYALL

SEQ ID NO: 12715 - protein, 9 aa, synthetic construct
YPKFKYAVL

SEQ ID NO: 12716 - protein, 9 aa, synthetic construct
YPKGAGEML

SEQ ID NO: 12717 - protein, 9 aa, synthetic construct
YPKKLVQTY

SEQ ID NO: 12718 - protein, 9 aa, synthetic construct
YPKLKTDVL

SEQ ID NO: 12719 - protein, 9 aa, synthetic construct
YPKRPLLGL

SEQ ID NO: 12720 - protein, 8 aa, synthetic construct
YPLAVRPF

SEQ ID NO: 12721 - protein, 10 aa, synthetic construct
YPLCVGGAVY

SEQ ID NO: 12722 - protein, 11 aa, synthetic construct
YPLDLEGGSEY

SEQ ID NO: 12723 - protein, 9 aa, synthetic construct
YPLDLLLKL

SEQ ID NO: 12724 - protein, 11 aa, synthetic construct
YPLDPTTEHIY

SEQ ID NO: 12725 - protein, 9 aa, synthetic construct
YPLDVVVTW

SEQ ID NO: 12726 - protein, 11 aa, synthetic construct
YPLEDATHIAL

SEQ ID NO: 12727 - protein, 10 aa, synthetic construct
YPLEPRTETY

SEQ ID NO: 12728 - protein, 9 aa, synthetic construct
YPLESRPSL

SEQ ID NO: 12729 - protein, 9 aa, synthetic construct
YPLLQDPAY

SEQ ID NO: 12730 - protein, 9 aa, synthetic construct
YPLTCKVVY

SEQ ID NO: 12731 - protein, 9 aa, synthetic construct
YPLTIATLL

SEQ ID NO: 12732 - protein, 10 aa, synthetic construct
YPMDLGGRNF

SEQ ID NO: 12733 - protein, 11 aa, synthetic construct
YPNDETTERVF

SEQ ID NO: 12734 - protein, 9 aa, synthetic construct
YPNERFELL

SEQ ID NO: 12735 - protein, 9 aa, synthetic construct
YPNGLQVNF

SEQ ID NO: 12736 - protein, 9 aa, synthetic construct
YPNGTSAAL

SEQ ID NO: 12737 - protein, 9 aa, synthetic construct
YPNGVCTVY

SEQ ID NO: 12738 - protein, 9 aa, synthetic construct
YPNGVVVHY

SEQ ID NO: 12739 - protein, 10 aa, synthetic construct
YPNIGGIIRY

SEQ ID NO: 12740 - protein, 8 aa, synthetic construct
YPNSKQLL

SEQ ID NO: 12741 - protein, 9 aa, synthetic construct
YPNSYFTGL

SEQ ID NO: 12742 - protein, 8 aa, synthetic construct
YPNTPYAY

SEQ ID NO: 12743 - protein, 9 aa, synthetic construct
YPNVNVHNF

SEQ ID NO: 12744 - protein, 9 aa, synthetic construct
YPPGTQVVY

SEQ ID NO: 12745 - protein, 9 aa, synthetic construct
YPQEDYESF

SEQ ID NO: 12746 - protein, 9 aa, synthetic construct
YPQFSGQSF

SEQ ID NO: 12747 - protein, 9 aa, synthetic construct
YPQPSYNQY

SEQ ID NO: 12748 - protein, 9 aa, synthetic construct
YPREQINQL

SEQ ID NO: 12749 - protein, 11 aa, synthetic construct
YPRGGSSEIAF

SEQ ID NO: 12750 - protein, 9 aa, synthetic construct
YPRKPISKL

SEQ ID NO: 12751 - protein, 9 aa, synthetic construct
YPRLGGFVM

SEQ ID NO: 12752 - protein, 9 aa, synthetic construct
YPRLKVLAF

SEQ ID NO: 12753 - protein, 9 aa, synthetic construct
YPRSDVDLY

SEQ ID NO: 12754 - protein, 9 aa, synthetic construct
YPRSILTSL

SEQ ID NO: 12755 - protein, 9 aa, synthetic construct
YPRSLFPSL

SEQ ID NO: 12756 - protein, 9 aa, synthetic construct
YPSAISTTY

SEQ ID NO: 12757 - protein, 8 aa, synthetic construct
YPSEFATY

SEQ ID NO: 12758 - protein, 9 aa, synthetic construct
YPSEFATYL

SEQ ID NO: 12759 - protein, 8 aa, synthetic construct
YPSEFSTY

SEQ ID NO: 12760 - protein, 9 aa, synthetic construct
YPSEFSTYL

SEQ ID NO: 12761 - protein, 9 aa, synthetic construct
YPSEILDPH

SEQ ID NO: 12762 - protein, 9 aa, synthetic construct
YPSLPTPLL

SEQ ID NO: 12763 - protein, 9 aa, synthetic construct
YPSLPTMTV

SEQ ID NO: 12764 - protein, 11 aa, synthetic construct
YPSPDISPPIF

SEQ ID NO: 12765 - protein, 10 aa, synthetic construct
YPSRAVITTM

SEQ ID NO: 12766 - protein, 11 aa, synthetic construct
YPSRVFVGDTF

SEQ ID NO: 12767 - protein, 8 aa, synthetic construct
YPSTGSIL

SEQ ID NO: 12768 - protein, 9 aa, synthetic construct
YPTEDYKVY

SEQ ID NO: 12769 - protein, 9 aa, synthetic construct
YPTQPGQGY

SEQ ID NO: 12770 - protein, 10 aa, synthetic construct
YPTSIASLAF

SEQ ID NO: 12771 - protein, 9 aa, synthetic construct
YPTSSSTSF

SEQ ID NO: 12772 - protein, 8 aa, synthetic construct
YPTTTISY

SEQ ID NO: 12773 - protein, 9 aa, synthetic construct
YPTVASVPH

SEQ ID NO: 12774 - protein, 9 aa, synthetic construct
YPVEHPDKF

SEQ ID NO: 12775 - protein, 8 aa, synthetic construct
YPVEIHEY

SEQ ID NO: 12776 - protein, 9 aa, synthetic construct
YPVEIHEYL

SEQ ID NO: 12777 - protein, 9 aa, synthetic construct
YPVFRILTL

SEQ ID NO: 12778 - protein, 8 aa, synthetic construct
YPVGGLCY

SEQ ID NO: 12779 - protein, 9 aa, synthetic construct
YPVGGLCYY

SEQ ID NO: 12780 - protein, 10 aa, synthetic construct
YPVHAQMPSL

SEQ ID NO: 12781 - protein, 9 aa, synthetic construct
YPVKEKVFY

SEQ ID NO: 12782 - protein, 9 aa, synthetic construct
YPVRAKITY

SEQ ID NO: 12783 - protein, 9 aa, synthetic construct
YPVSARHWF

SEQ ID NO: 12784 - protein, 11 aa, synthetic construct
YPVTPELLERY

SEQ ID NO: 12785 - protein, 8 aa, synthetic construct
YPVVSIED

SEQ ID NO: 12786 - protein, 8 aa, synthetic construct
YPWFHGTL

SEQ ID NO: 12787 - protein, 9 aa, synthetic construct
YPWTIDNKY

SEQ ID NO: 12788 - protein, 8 aa, synthetic construct
YPYAAISY

SEQ ID NO: 12789 - protein, 9 aa, synthetic construct
YPYEHSYGL

SEQ ID NO: 12790 - protein, 9 aa, synthetic construct
YPYLADRHY

SEQ ID NO: 12791 - protein, 9 aa, synthetic construct
YPYPGELTM

SEQ ID NO: 12792 - protein, 10 aa, synthetic construct
YPYPGELTMM

SEQ ID NO: 12793 - protein, 10 aa, synthetic construct
YPYPPPPPEF

SEQ ID NO: 12794 - protein, 11 aa, synthetic construct
YPMDLGGRNFL

SEQ ID NO: 12795 - protein, 10 aa, synthetic construct
YPMYSRDYVY

SEQ ID NO: 12796 - protein, 8 aa, synthetic construct
YQAELSQM

SEQ ID NO: 12797 - protein, 9 aa, synthetic construct
YQDPSVLYI

SEQ ID NO: 12798 - protein, 9 aa, synthetic construct
YQFGEIRTI

SEQ ID NO: 12799 - protein, 8 aa, synthetic construct
YQFLHHTL

SEQ ID NO: 12800 - protein, 9 aa, synthetic construct
YQFSKNFSL

SEQ ID NO: 12801 - protein, 8 aa, synthetic construct
YQHKFPEV

SEQ ID NO: 12802 - protein, 8 aa, synthetic construct
YQIHLKSV

SEQ ID NO: 12803 - protein, 9 aa, synthetic construct
YQLIHQGTK

SEQ ID NO: 12804 - protein, 8 aa, synthetic construct
YQSKYEEL

SEQ ID NO: 12805 - protein, 9 aa, synthetic construct
YQTAISENY

SEQ ID NO: 12806 - protein, 8 aa, synthetic construct
YQVALSMV

SEQ ID NO: 12807 - protein, 9 aa, synthetic construct
YQVGQLYSV

SEQ ID NO: 12808 - protein, 8 aa, synthetic construct
YQVILDGV

SEQ ID NO: 12809 - protein, 9 aa, synthetic construct
YQYPVIIHL

SEQ ID NO: 12810 - protein, 9 aa, synthetic construct
YRAQLEVKV

SEQ ID NO: 12811 - protein, 10 aa, synthetic construct
YRCPSCSVVF

SEQ ID NO: 12812 - protein, 8 aa, synthetic construct
YRDDLKKL

SEQ ID NO: 12813 - protein, 9 aa, synthetic construct
YRFETVQKL

SEQ ID NO: 12814 - protein, 9 aa, synthetic construct
YRFGDSQQL

SEQ ID NO: 12815 - protein, 10 aa, synthetic construct
YRFGEMQLDF

SEQ ID NO: 12816 - protein, 11 aa, synthetic construct
YRFGQVYTEAK

SEQ ID NO: 12817 - protein, 10 aa, synthetic construct
YRFNGQYSSL

SEQ ID NO: 12818 - protein, 9 aa, synthetic construct
YRHDLINQL

SEQ ID NO: 12819 - protein, 9 aa, synthetic construct
YRHFFGHTF

SEQ ID NO: 12820 - protein, 9 aa, synthetic construct
YRHPSLQVL

SEQ ID NO: 12821 - protein, 9 aa, synthetic construct
YRIKFKESF

SEQ ID NO: 12822 - protein, 9 aa, synthetic construct
YRLAVRTVI

SEQ ID NO: 12823 - protein, 9 aa, synthetic construct
YRLGAPFTV

SEQ ID NO: 12824 - protein, 9 aa, synthetic construct
YRLGPLLGK

SEQ ID NO: 12825 - protein, 9 aa, synthetic construct
YRNAYTMVL

SEQ ID NO: 12826 - protein, 9 aa, synthetic construct
YRPAYLVTL

SEQ ID NO: 12827 - protein, 8 aa, synthetic construct
YRPGTVAL

SEQ ID NO: 12828 - protein, 9 aa, synthetic construct
YRPHTITLL

SEQ ID NO: 12829 - protein, 8 aa, synthetic construct
YRPPEVIL

SEQ ID NO: 12830 - protein, 9 aa, synthetic construct
YRQKQVVIL

SEQ ID NO: 12831 - protein, 9 aa, synthetic construct
YRQLLVRTL

SEQ ID NO: 12832 - protein, 9 aa, synthetic construct
YRRKDGVFL

SEQ ID NO: 12833 - protein, 9 aa, synthetic construct
YRTDMIQAL

SEQ ID NO: 12834 - protein, 9 aa, synthetic construct
YRVHSIFVL

SEQ ID NO: 12835 - protein, 9 aa, synthetic construct
YRVNGQYIM

SEQ ID NO: 12836 - protein, 10 aa, synthetic construct
YRVPDVLVAD

SEQ ID NO: 12837 - protein, 10 aa, synthetic construct
YRVRIAHQHF

SEQ ID NO: 12838 - protein, 9 aa, synthetic construct
YRVTIHKTF

SEQ ID NO: 12839 - protein, 11 aa, synthetic construct
YRVTLNPPGTF

SEQ ID NO: 12840 - protein, 9 aa, synthetic construct
YRVVFPLEL

SEQ ID NO: 12841 - protein, 9 aa, synthetic construct
YRYLVKAFR

SEQ ID NO: 12842 - protein, 9 aa, synthetic construct
YSAAWAEYY

SEQ ID NO: 12843 - protein, 10 aa, synthetic construct
YSDAFLNDSY

SEQ ID NO: 12844 - protein, 9 aa, synthetic construct
YSDDIPHAL

SEQ ID NO: 12845 - protein, 9 aa, synthetic construct
YSDFFTDCY

SEQ ID NO: 12846 - protein, 9 aa, synthetic construct
YSDKYGLGY

SEQ ID NO: 12847 - protein, 10 aa, synthetic construct
YSDPSIIVLY

SEQ ID NO: 12848 - protein, 10 aa, synthetic construct
YSEDLSDMHY

SEQ ID NO: 12849 - protein, 9 aa, synthetic construct
YSEEIVEMY

SEQ ID NO: 12850 - protein, 8 aa, synthetic construct
YSGKVRYI

SEQ ID NO: 12851 - protein, 9 aa, synthetic construct
YSKPRLATF

SEQ ID NO: 12852 - protein, 8 aa, synthetic construct
YSKYYKTI

SEQ ID NO: 12853 - protein, 9 aa, synthetic construct
YSKYYKTID

SEQ ID NO: 12854 - protein, 10 aa, synthetic construct
YSKYYKTIDD

SEQ ID NO: 12855 - protein, 9 aa, synthetic construct
YSLDHISSL

SEQ ID NO: 12856 - protein, 8 aa, synthetic construct
YSPHLLAN

SEQ ID NO: 12857 - protein, 8 aa, synthetic construct
YSPISITS

SEQ ID NO: 12858 - protein, 9 aa, synthetic construct
YSPISITSA

SEQ ID NO: 12859 - protein, 9 aa, synthetic construct
YSPYFKTIE

SEQ ID NO: 12860 - protein, 10 aa, synthetic construct
YSPYFKTIED

SEQ ID NO: 12861 - protein, 9 aa, synthetic construct
YSQLVVETI

SEQ ID NO: 12862 - protein, 9 aa, synthetic construct
YSSPYPQEY

SEQ ID NO: 12863 - protein, 11 aa, synthetic construct
YTADGKEVLEY

SEQ ID NO: 12864 - protein, 9 aa, synthetic construct
YTAQPTQGY

SEQ ID NO: 12865 - protein, 9 aa, synthetic construct
YTARSKCLT

SEQ ID NO: 12866 - protein, 8 aa, synthetic construct
YTDAALNY

SEQ ID NO: 12867 - protein, 8 aa, synthetic construct
YTDKIMTY

SEQ ID NO: 12868 - protein, 9 aa, synthetic construct
YTDKKSIIY

SEQ ID NO: 12869 - protein, 8 aa, synthetic construct
YTDLEVRV

SEQ ID NO: 12870 - protein, 10 aa, synthetic construct
YTDLLRLFEY

SEQ ID NO: 12871 - protein, 8 aa, synthetic construct
YTDVSTRY

SEQ ID NO: 12872 - protein, 11 aa, synthetic construct
YTEHQVVSSDF

SEQ ID NO: 12873 - protein, 9 aa, synthetic construct
YTELEAIMY

SEQ ID NO: 12874 - protein, 11 aa, synthetic construct
YTERDASGMLY

SEQ ID NO: 12875 - protein, 10 aa, synthetic construct
YTETEPYHNY

SEQ ID NO: 12876 - protein, 9 aa, synthetic construct
YTGTPDWLY

SEQ ID NO: 12877 - protein, 9 aa, synthetic construct
YTIATILHY

SEQ ID NO: 12878 - protein, 9 aa, synthetic construct
YTIEFLRHL

SEQ ID NO: 12879 - protein, 9 aa, synthetic construct
YTIEILKVE

SEQ ID NO: 12880 - protein, 9 aa, synthetic construct
YTLDSILFL

SEQ ID NO: 12881 - protein, 9 aa, synthetic construct
YTNGKCVIL

SEQ ID NO: 12882 - protein, 9 aa, synthetic construct
YTPYGWLQL

SEQ ID NO: 12883 - protein, 9 aa, synthetic construct
YTVGGLETF

SEQ ID NO: 12884 - protein, 8 aa, synthetic construct
YTYGKHIL

SEQ ID NO: 12885 - protein, 9 aa, synthetic construct
YTMKEVLFY

SEQ ID NO: 12886 - protein, 9 aa, synthetic construct
YTMTSTLEY

SEQ ID NO: 12887 - protein, 9 aa, synthetic construct
YVAEILPKY

SEQ ID NO: 12888 - protein, 9 aa, synthetic construct
YVDDFGVSV

SEQ ID NO: 12889 - protein, 10 aa, synthetic construct
YVHDDGRVSY

SEQ ID NO: 12890 - protein, 9 aa, synthetic construct
YVHETLTVY

SEQ ID NO: 12891 - protein, 8 aa, synthetic construct
YVHNDIFR

SEQ ID NO: 12892 - protein, 10 aa, synthetic construct
YVIPHPVHAF

SEQ ID NO: 12893 - protein, 9 aa, synthetic construct
YVKDLAFVD

SEQ ID NO: 12894 - protein, 9 aa, synthetic construct
YVKDVLGHY

SEQ ID NO: 12895 - protein, 9 aa, synthetic construct
YVLKKAQVL

SEQ ID NO: 12896 - protein, 10 aa, synthetic construct
YVNVEFGVPF

SEQ ID NO: 12897 - protein, 9 aa, synthetic construct
YVPDVTGRY

SEQ ID NO: 12898 - protein, 9 aa, synthetic construct
YVRDNTGVL

SEQ ID NO: 12899 - protein, 9 aa, synthetic construct
YVSDINSVY

SEQ ID NO: 12900 - protein, 10 aa, synthetic construct
YVSFGPHAGK

SEQ ID NO: 12901 - protein, 10 aa, synthetic construct
YVSIHSSGFR

SEQ ID NO: 12902 - protein, 9 aa, synthetic construct
YVTEDFTTY

SEQ ID NO: 12903 - protein, 11 aa, synthetic construct
YVTIIDAPGHR

SEQ ID NO: 12904 - protein, 9 aa, synthetic construct
YVYDGDSIY

SEQ ID NO: 12905 - protein, 9 aa, synthetic construct
YVYEYPSRY

SEQ ID NO: 12906 - protein, 9 aa, synthetic construct
YYDDYRVQL

SEQ ID NO: 12907 - protein, 9 aa, synthetic construct
YYDKHFTEF

SEQ ID NO: 12908 - protein, 9 aa, synthetic construct
YYDPKHVIF

SEQ ID NO: 12909 - protein, 9 aa, synthetic construct
YYDVAKILI

SEQ ID NO: 12910 - protein, 9 aa, synthetic construct
YYDVAKQLL

SEQ ID NO: 12911 - protein, 9 aa, synthetic construct
YYEDGNVQL

SEQ ID NO: 12912 - protein, 10 aa, synthetic construct
YYFEGIKQTF

SEQ ID NO: 12913 - protein, 8 aa, synthetic construct
YYFNQHIF

SEQ ID NO: 12914 - protein, 9 aa, synthetic construct
YYFSKLIEF

SEQ ID NO: 12915 - protein, 9 aa, synthetic construct
YYIDCIRQV

SEQ ID NO: 12916 - protein, 9 aa, synthetic construct
YYIFIPSKF

SEQ ID NO: 12917 - protein, 9 aa, synthetic construct
YYINGKTGL

SEQ ID NO: 12918 - protein, 8 aa, synthetic construct
YYINSPEL

SEQ ID NO: 12919 - protein, 8 aa, synthetic construct
YYITGETK

SEQ ID NO: 12920 - protein, 8 aa, synthetic construct
YYKTKRVL

SEQ ID NO: 12921 - protein, 9 aa, synthetic construct
YYLNDLERI

SEQ ID NO: 12922 - protein, 8 aa, synthetic construct
YYNTITNF

SEQ ID NO: 12923 - protein, 9 aa, synthetic construct
YYPRVEYGF

SEQ ID NO: 12924 - protein, 9 aa, synthetic construct
YYQHIVTTL

SEQ ID NO: 12925 - protein, 11 aa, synthetic construct
YYSPHGHILVL

SEQ ID NO: 12926 - protein, 9 aa, synthetic construct
YYTEFPTVL

SEQ ID NO: 12927 - protein, 8 aa, synthetic construct
YYVNRDTL

SEQ ID NO: 12928 - protein, 9 aa, synthetic construct
YYVRAVLHL

SEQ ID NO: 12929 - protein, 9 aa, synthetic construct
YMAELIERL

SEQ ID NO: 12930 - protein, 9 aa, synthetic construct
MACAIADAF

SEQ ID NO: 12931 - protein, 9 aa, synthetic construct
MADPNIRFL

SEQ ID NO: 12932 - protein, 9 aa, synthetic construct
MAGDIYSVF

SEQ ID NO: 12933 - protein, 9 aa, synthetic construct
MALLVPLVY

SEQ ID NO: 12934 - protein, 9 aa, synthetic construct
MASLGALAL

SEQ ID NO: 12935 - protein, 9 aa, synthetic construct
MAVELPDSF

SEQ ID NO: 12936 - protein, 9 aa, synthetic construct
MAYGHIDSY

SEQ ID NO: 12937 - protein, 10 aa, synthetic construct
MDLESQIESL

SEQ ID NO: 12938 - protein, 9 aa, synthetic construct
MEFERQAEI

SEQ ID NO: 12939 - protein, 8 aa, synthetic construct
MEFQVPVI

SEQ ID NO: 12940 - protein, 11 aa, synthetic construct
MEGPLSVFGDR

SEQ ID NO: 12941 - protein, 9 aa, synthetic construct
MESIIRSEL

SEQ ID NO: 12942 - protein, 9 aa, synthetic construct
MEYAWGRAA

SEQ ID NO: 12943 - protein, 8 aa, synthetic construct
MEYHPRII

SEQ ID NO: 12944 - protein, 9 aa, synthetic construct
MEYIHKIEA

SEQ ID NO: 12945 - protein, 8 aa, synthetic construct
MFEELRNA

SEQ ID NO: 12946 - protein, 9 aa, synthetic construct
MFPLVKSAL

SEQ ID NO: 12947 - protein, 9 aa, synthetic construct
MGIPEAIVY

SEQ ID NO: 12948 - protein, 9 aa, synthetic construct
MGIPTYGHS

SEQ ID NO: 12949 - protein, 9 aa, synthetic construct
MGSPSIFVY

SEQ ID NO: 12950 - protein, 9 aa, synthetic construct
MILLEVNNR

SEQ ID NO: 12951 - protein, 11 aa, synthetic construct
MILPVGAANFR

SEQ ID NO: 12952 - protein, 8 aa, synthetic construct
MIPGGLSE

SEQ ID NO: 12953 - protein, 8 aa, synthetic construct
MISNPLPA

SEQ ID NO: 12954 - protein, 8 aa, synthetic construct
MKENFPNF

SEQ ID NO: 12955 - protein, 11 aa, synthetic construct
MKPILLQGHER

SEQ ID NO: 12956 - protein, 9 aa, synthetic construct
MLDSLRIYL

SEQ ID NO: 12957 - protein, 9 aa, synthetic construct
MLFGHPLLV

SEQ ID NO: 12958 - protein, 9 aa, synthetic construct
MLFPGSIAL

SEQ ID NO: 12959 - protein, 9 aa, synthetic construct
MLKDIIKEY

SEQ ID NO: 12960 - protein, 8 aa, synthetic construct
MLKIRSEF

SEQ ID NO: 12961 - protein, 9 aa, synthetic construct
MLLDFIQHI

SEQ ID NO: 12962 - protein, 9 aa, synthetic construct
MLRNKLVRL

SEQ ID NO: 12963 - protein, 9 aa, synthetic construct
MLTELEKAL

SEQ ID NO: 12964 - protein, 10 aa, synthetic construct
MLTELEKALN

SEQ ID NO: 12965 - protein, 8 aa, synthetic construct
MNKYKVVL

SEQ ID NO: 12966 - protein, 9 aa, synthetic construct
MPAAKRLRL

SEQ ID NO: 12967 - protein, 9 aa, synthetic construct
MPAFLRSAL

SEQ ID NO: 12968 - protein, 11 aa, synthetic construct
MPAFSKIGGIL

SEQ ID NO: 12969 - protein, 9 aa, synthetic construct
MPALRSINL

SEQ ID NO: 12970 - protein, 10 aa, synthetic construct
MPANNKCLIF

SEQ ID NO: 12971 - protein, 9 aa, synthetic construct
MPANSGLAL

SEQ ID NO: 12972 - protein, 9 aa, synthetic construct
MPARWLTHL

SEQ ID NO: 12973 - protein, 9 aa, synthetic construct
MPAVKAIIY

SEQ ID NO: 12974 - protein, 11 aa, synthetic construct
MPAVKAIIYQY

SEQ ID NO: 12975 - protein, 11 aa, synthetic construct
MPDPKTFKQHF

SEQ ID NO: 12976 - protein, 8 aa, synthetic construct
MPDTPRLF

SEQ ID NO: 12977 - protein, 9 aa, synthetic construct
MPDVTETLY

SEQ ID NO: 12978 - protein, 9 aa, synthetic construct
MPEEEYSEF

SEQ ID NO: 12979 - protein, 10 aa, synthetic construct
MPEEKLVEAL

SEQ ID NO: 12980 - protein, 9 aa, synthetic construct
MPEKEPSVL

SEQ ID NO: 12981 - protein, 10 aa, synthetic construct
MPEPRYVVSM

SEQ ID NO: 12982 - protein, 10 aa, synthetic construct
MPFAWAPISL

SEQ ID NO: 12983 - protein, 8 aa, synthetic construct
MPFEREQL

SEQ ID NO: 12984 - protein, 10 aa, synthetic construct
MPFIKSQHEL

SEQ ID NO: 12985 - protein, 10 aa, synthetic construct
MPGFAPLTSR

SEQ ID NO: 12986 - protein, 9 aa, synthetic construct
MPGTRFIAF

SEQ ID NO: 12987 - protein, 11 aa, synthetic construct
MPHPETGKDLY

SEQ ID NO: 12988 - protein, 11 aa, synthetic construct
MPIQEERFVTY

SEQ ID NO: 12989 - protein, 9 aa, synthetic construct
MPISSHVDL

SEQ ID NO: 12990 - protein, 9 aa, synthetic construct
MPIVLELIP

SEQ ID NO: 12991 - protein, 9 aa, synthetic construct
MPKLKPVEL

SEQ ID NO: 12992 - protein, 9 aa, synthetic construct
MPKLRVLEL

SEQ ID NO: 12993 - protein, 9 aa, synthetic construct
MPKPPNLIM

SEQ ID NO: 12994 - protein, 9 aa, synthetic construct
MPKVKTIEL

SEQ ID NO: 12995 - protein, 9 aa, synthetic construct
MPLAFSDKY

SEQ ID NO: 12996 - protein, 9 aa, synthetic construct
MPLPGTKAL

SEQ ID NO: 12997 - protein, 11 aa, synthetic construct
MPLRDDYEIEY

SEQ ID NO: 12998 - protein, 8 aa, synthetic construct
MPLTVDEY

SEQ ID NO: 12999 - protein, 9 aa, synthetic construct
MPLVKSVTV

SEQ ID NO: 13000 - protein, 11 aa, synthetic construct
MPRNGTGVLIL

SEQ ID NO: 13001 - protein, 10 aa, synthetic construct
MPRQPSATRL

SEQ ID NO: 13002 - protein, 9 aa, synthetic construct
MPRVQTQQY

SEQ ID NO: 13003 - protein, 9 aa, synthetic construct
MPSDVLEVT

SEQ ID NO: 13004 - protein, 9 aa, synthetic construct
MPSEDVVSL

SEQ ID NO: 13005 - protein, 10 aa, synthetic construct
MPSEQIRNQL

SEQ ID NO: 13006 - protein, 10 aa, synthetic construct
MPSLKHIVEL

SEQ ID NO: 13007 - protein, 9 aa, synthetic construct
MPSQFRDIL

SEQ ID NO: 13008 - protein, 10 aa, synthetic construct
MPSTPGFVGY

SEQ ID NO: 13009 - protein, 11 aa, synthetic construct
MPVAAREASIY

SEQ ID NO: 13010 - protein, 8 aa, synthetic construct
MPVLKVVL

SEQ ID NO: 13011 - protein, 9 aa, synthetic construct
MPVPVILNF

SEQ ID NO: 13012 - protein, 9 aa, synthetic construct
MPYTRLTQL

SEQ ID NO: 13013 - protein, 9 aa, synthetic construct
MQDPMEIFV

SEQ ID NO: 13014 - protein, 9 aa, synthetic construct
MQIFVKTLT

SEQ ID NO: 13015 - protein, 10 aa, synthetic construct
MQIFVKTLTG

SEQ ID NO: 13016 - protein, 9 aa, synthetic construct
MRCALALSA

SEQ ID NO: 13017 - protein, 11 aa, synthetic construct
MRLELDALRSK

SEQ ID NO: 13018 - protein, 9 aa, synthetic construct
MRLLPLRQK

SEQ ID NO: 13019 - protein, 11 aa, synthetic construct
MRLSLPLLLLL

SEQ ID NO: 13020 - protein, 9 aa, synthetic construct
MRSLLRTPF

SEQ ID NO: 13021 - protein, 9 aa, synthetic construct
MRMLEVFVL

SEQ ID NO: 13022 - protein, 10 aa, synthetic construct
MSDSYLPSYY

SEQ ID NO: 13023 - protein, 8 aa, synthetic construct
MTDVLVFL

SEQ ID NO: 13024 - protein, 9 aa, synthetic construct
MTFDVASLY

SEQ ID NO: 13025 - protein, 9 aa, synthetic construct
MTLGQIYYL

SEQ ID NO: 13026 - protein, 9 aa, synthetic construct
MVDGTLLLL

SEQ ID NO: 13027 - protein, 9 aa, synthetic construct
MVHSLIEAY

SEQ ID NO: 13028 - protein, 9 aa, synthetic construct
MVLENVKEM

SEQ ID NO: 13029 - protein, 10 aa, synthetic construct
MVLGGCPVSY

SEQ ID NO: 13030 - protein, 9 aa, synthetic construct
MVPEPTSAL

SEQ ID NO: 13031 - protein, 9 aa, synthetic construct
MMKLIINSL

SEQ ID NO: 13032 - protein, 8 aa, synthetic construct
MMLRMHNL

SEQ ID NO: 13033 - protein, 8 aa, synthetic construct
NGDAKTDQ

SEQ ID NO: 13034 - protein, 11 aa, synthetic construct
NGDAKTDQAQK

SEQ ID NO: 13035 - protein, 11 aa, synthetic construct
QAEDVIRHGAD

SEQ ID NO: 13036 - protein, 8 aa, synthetic construct
QAIKGMHI

SEQ ID NO: 13037 - protein, 10 aa, synthetic construct
QAQKQQVQEL

SEQ ID NO: 13038 - protein, 11 aa, synthetic construct
QDEAYDTTDSL

SEQ ID NO: 13039 - protein, 10 aa, synthetic construct
QDLDEDVSQE

SEQ ID NO: 13040 - protein, 9 aa, synthetic construct
QEFTDHLVK

SEQ ID NO: 13041 - protein, 11 aa, synthetic construct
QENQDGRYSLT

SEQ ID NO: 13042 - protein, 11 aa, synthetic construct
QFPETLSYLYK

SEQ ID NO: 13043 - protein, 8 aa, synthetic construct
QFTGIKKY

SEQ ID NO: 13044 - protein, 10 aa, synthetic construct
QFVFDIHKGS

SEQ ID NO: 13045 - protein, 8 aa, synthetic construct
QFYDTQVI

SEQ ID NO: 13046 - protein, 9 aa, synthetic construct
QGMLRKLDI

SEQ ID NO: 13047 - protein, 11 aa, synthetic construct
QHVTEAFQFHF

SEQ ID NO: 13048 - protein, 9 aa, synthetic construct
QIEHEVSSS

SEQ ID NO: 13049 - protein, 9 aa, synthetic construct
QIKQKVDSL

SEQ ID NO: 13050 - protein, 8 aa, synthetic construct
QILVGVNK

SEQ ID NO: 13051 - protein, 8 aa, synthetic construct
QIPLAAVI

SEQ ID NO: 13052 - protein, 11 aa, synthetic construct
QKENAGEDPGL

SEQ ID NO: 13053 - protein, 9 aa, synthetic construct
QLHIKVTSL

SEQ ID NO: 13054 - protein, 9 aa, synthetic construct
QLKERLEAF

SEQ ID NO: 13055 - protein, 9 aa, synthetic construct
QLKSDQSRL

SEQ ID NO: 13056 - protein, 10 aa, synthetic construct
QLKSDQSRLD

SEQ ID NO: 13057 - protein, 8 aa, synthetic construct
QLLKKATL

SEQ ID NO: 13058 - protein, 9 aa, synthetic construct
QLLLRKLPF

SEQ ID NO: 13059 - protein, 9 aa, synthetic construct
QLLNATELT

SEQ ID NO: 13060 - protein, 10 aa, synthetic construct
QLLQPPGPLG

SEQ ID NO: 13061 - protein, 8 aa, synthetic construct
QLPVAQII

SEQ ID NO: 13062 - protein, 9 aa, synthetic construct
QMRQQKLLV

SEQ ID NO: 13063 - protein, 9 aa, synthetic construct
QPEDKRLLL

SEQ ID NO: 13064 - protein, 9 aa, synthetic construct
QPHLSRQDL

SEQ ID NO: 13065 - protein, 10 aa, synthetic construct
QPRTPSPLVL

SEQ ID NO: 13066 - protein, 11 aa, synthetic construct
QPMTQHLHVTY

SEQ ID NO: 13067 - protein, 8 aa, synthetic construct
QQHKLLKV

SEQ ID NO: 13068 - protein, 8 aa, synthetic construct
QQIELLEI

SEQ ID NO: 13069 - protein, 8 aa, synthetic construct
QQIKTWNI

SEQ ID NO: 13070 - protein, 8 aa, synthetic construct
QQIQAQLV

SEQ ID NO: 13071 - protein, 8 aa, synthetic construct
QQIQKVVM

SEQ ID NO: 13072 - protein, 9 aa, synthetic construct
QQLEIVCLI

SEQ ID NO: 13073 - protein, 10 aa, synthetic construct
QQLIENSTTF

SEQ ID NO: 13074 - protein, 8 aa, synthetic construct
QQLKMKVI

SEQ ID NO: 13075 - protein, 8 aa, synthetic construct
QQLLKRVL

SEQ ID NO: 13076 - protein, 8 aa, synthetic construct
QQLQQRQI

SEQ ID NO: 13077 - protein, 8 aa, synthetic construct
QQLRLVRI

SEQ ID NO: 13078 - protein, 8 aa, synthetic construct
QQLVSHEV

SEQ ID NO: 13079 - protein, 8 aa, synthetic construct
QQPTAVQV

SEQ ID NO: 13080 - protein, 8 aa, synthetic construct
QQSKILKV

SEQ ID NO: 13081 - protein, 8 aa, synthetic construct
QQTIIACI

SEQ ID NO: 13082 - protein, 8 aa, synthetic construct
QQVAIKKI

SEQ ID NO: 13083 - protein, 8 aa, synthetic construct
QQVIVQGV

SEQ ID NO: 13084 - protein, 8 aa, synthetic construct
QQVKLYKL

SEQ ID NO: 13085 - protein, 8 aa, synthetic construct
QQVLVRKL

SEQ ID NO: 13086 - protein, 8 aa, synthetic construct
QQVPVNQV

SEQ ID NO: 13087 - protein, 8 aa, synthetic construct
QQVVAIKI

SEQ ID NO: 13088 - protein, 8 aa, synthetic construct
QQYIQQNI

SEQ ID NO: 13089 - protein, 9 aa, synthetic construct
QRAAVIERF

SEQ ID NO: 13090 - protein, 9 aa, synthetic construct
QRFGPPVSR

SEQ ID NO: 13091 - protein, 10 aa, synthetic construct
QRLPMPALSL

SEQ ID NO: 13092 - protein, 10 aa, synthetic construct
QSEIKDVLVW

SEQ ID NO: 13093 - protein, 10 aa, synthetic construct
QSNETALHYF

SEQ ID NO: 13094 - protein, 8 aa, synthetic construct
QSTGFGQY

SEQ ID NO: 13095 - protein, 8 aa, synthetic construct
QSVYISKI

SEQ ID NO: 13096 - protein, 8 aa, synthetic construct
QTPVLYAM

SEQ ID NO: 13097 - protein, 11 aa, synthetic construct
QTMIEAHVDVK

SEQ ID NO: 13098 - protein, 9 aa, synthetic construct
QVGVINEAQ

SEQ ID NO: 13099 - protein, 8 aa, synthetic construct
QVHPDTGI

SEQ ID NO: 13100 - protein, 9 aa, synthetic construct
QVHPDTGIS

SEQ ID NO: 13101 - protein, 10 aa, synthetic construct
QVHPDTGISS

SEQ ID NO: 13102 - protein, 9 aa, synthetic construct
QVKVRDTYL

SEQ ID NO: 13103 - protein, 10 aa, synthetic construct
QVPGFGVADA

SEQ ID NO: 13104 - protein, 9 aa, synthetic construct
QVSTHEQSE

SEQ ID NO: 13105 - protein, 8 aa, synthetic construct
QWEETVTY

SEQ ID NO: 13106 - protein, 8 aa, synthetic construct
QYLRIRTV

SEQ ID NO: 13107 - protein, 8 aa, synthetic construct
QYYLTTEV

SEQ ID NO: 13108 - protein, 8 aa, synthetic construct
QMEKALSL

SEQ ID NO: 13109 - protein, 8 aa, synthetic construct
QMIKAWQV

SEQ ID NO: 13110 - protein, 8 aa, synthetic construct
QMKLTHVI

SEQ ID NO: 13111 - protein, 9 aa, synthetic construct
QMLEGQTQV

SEQ ID NO: 13112 - protein, 9 aa, synthetic construct
QMLENQMEV

SEQ ID NO: 13113 - protein, 7 aa, synthetic construct
AIQNLLY

SEQ ID NO: 13114 - protein, 8 aa, synthetic construct
IINDYEEF

SEQ ID NO: 13115 - protein, 9 aa, synthetic construct
AQSFDVASV

SEQ ID NO: 13116 - protein, 9 aa, synthetic construct
VNSHFSECL

SEQ ID NO: 13117 - protein, 8 aa, synthetic construct
ALKDPNAF

SEQ ID NO: 13118 - protein, 10 aa, synthetic construct
AAAAAAAQYS

SEQ ID NO: 13119 - protein, 10 aa, synthetic construct
AAAASAAQSY

SEQ ID NO: 13120 - protein, 8 aa, synthetic construct
VNPFLPYI

SEQ ID NO: 13121 - protein, 9 aa, synthetic construct
AGFTTLLAE

SEQ ID NO: 13122 - protein, 7 aa, synthetic construct
QEEPVYI

SEQ ID NO: 13123 - protein, 11 aa, synthetic construct
VAADEDEDDDD

SEQ ID NO: 13124 - protein, 9 aa, synthetic construct
VTKTMYPPP

SEQ ID NO: 13125 - protein, 10 aa, synthetic construct
AAFAMPVLTP

SEQ ID NO: 13126 - protein, 9 aa, synthetic construct
AAMSTGTFV

SEQ ID NO: 13127 - protein, 10 aa, synthetic construct
VFDGPAAQPS

SEQ ID NO: 13128 - protein, 9 aa, synthetic construct
ITGNVFIAA

SEQ ID NO: 13129 - protein, 10 aa, synthetic construct
AAGYLIGGAL

SEQ ID NO: 13130 - protein, 8 aa, synthetic construct
AAFTIFRT

SEQ ID NO: 13131 - protein, 8 aa, synthetic construct
AAPVSRDR

SEQ ID NO: 13132 - protein, 9 aa, synthetic construct
AAFHGAGLK

SEQ ID NO: 13133 - protein, 8 aa, synthetic construct
AAFKPEAY

SEQ ID NO: 13134 - protein, 9 aa, synthetic construct
KEVSMASAA

SEQ ID NO: 13135 - protein, 9 aa, synthetic construct
ANGSGFVTR

SEQ ID NO: 13136 - protein, 11 aa, synthetic construct
AAGTITQAPPY

SEQ ID NO: 13137 - protein, 11 aa, synthetic construct
AGAPYAERLAA

SEQ ID NO: 13138 - protein, 10 aa, synthetic construct
AAKFGMHLQA

SEQ ID NO: 13139 - protein, 10 aa, synthetic construct
AAHRSAGTRY

SEQ ID NO: 13140 - protein, 11 aa, synthetic construct
AAGVAVLDNPY

SEQ ID NO: 13141 - protein, 8 aa, synthetic construct
AAMCLVSF

SEQ ID NO: 13142 - protein, 8 aa, synthetic construct
PQLGGPAL

SEQ ID NO: 13143 - protein, 9 aa, synthetic construct
AGAQLSWLY

SEQ ID NO: 13144 - protein, 7 aa, synthetic construct
TFNDVEK

SEQ ID NO: 13145 - protein, 9 aa, synthetic construct
VVAGVANAL

SEQ ID NO: 13146 - protein, 11 aa, synthetic construct
AALVASQVPRG

SEQ ID NO: 13147 - protein, 8 aa, synthetic construct
AALWPWQR

SEQ ID NO: 13148 - protein, 9 aa, synthetic construct
ALKKALAAA

SEQ ID NO: 13149 - protein, 7 aa, synthetic construct
QLRKIVK

SEQ ID NO: 13150 - protein, 8 aa, synthetic construct
VRPLIAAK

SEQ ID NO: 13151 - protein, 8 aa, synthetic construct
ILTFIPQF

SEQ ID NO: 13152 - protein, 9 aa, synthetic construct
EQPFLSVFK

SEQ ID NO: 13153 - protein, 8 aa, synthetic construct
WPWTPGVF

SEQ ID NO: 13154 - protein, 9 aa, synthetic construct
FGHPSQAVF

SEQ ID NO: 13155 - protein, 8 aa, synthetic construct
QKAIASSL

SEQ ID NO: 13156 - protein, 8 aa, synthetic construct
APAAPEAP

SEQ ID NO: 13157 - protein, 10 aa, synthetic construct
AAPAHPAATL

SEQ ID NO: 13158 - protein, 9 aa, synthetic construct
AALGPCSYL

SEQ ID NO: 13159 - protein, 9 aa, synthetic construct
AAPGESLEV

SEQ ID NO: 13160 - protein, 9 aa, synthetic construct
GDVYSPEEL

SEQ ID NO: 13161 - protein, 8 aa, synthetic construct
LSKTFPAA

SEQ ID NO: 13162 - protein, 9 aa, synthetic construct
AAAPALETQ

SEQ ID NO: 13163 - protein, 10 aa, synthetic construct
AAPPSSTLQL

SEQ ID NO: 13164 - protein, 8 aa, synthetic construct
AAIPASTL

SEQ ID NO: 13165 - protein, 9 aa, synthetic construct
TFNLPSAAA

SEQ ID NO: 13166 - protein, 9 aa, synthetic construct
AAAPPAPAL

SEQ ID NO: 13167 - protein, 10 aa, synthetic construct
PAGAEGLSTF

SEQ ID NO: 13168 - protein, 9 aa, synthetic construct
AAPARPTGL

SEQ ID NO: 13169 - protein, 10 aa, synthetic construct
AAPSSSAAQL

SEQ ID NO: 13170 - protein, 9 aa, synthetic construct
AAGGEIFSL

SEQ ID NO: 13171 - protein, 8 aa, synthetic construct
QKVASLEL

SEQ ID NO: 13172 - protein, 9 aa, synthetic construct
LPQVGPAAL

SEQ ID NO: 13173 - protein, 10 aa, synthetic construct
AAAVAAMMEI

SEQ ID NO: 13174 - protein, 9 aa, synthetic construct
AASVGRCSM

SEQ ID NO: 13175 - protein, 9 aa, synthetic construct
AVRGSVGVL

SEQ ID NO: 13176 - protein, 9 aa, synthetic construct
VLCTSVNYL

SEQ ID NO: 13177 - protein, 8 aa, synthetic construct
ARAEVQTL

SEQ ID NO: 13178 - protein, 10 aa, synthetic construct
AASDGQVRMI

SEQ ID NO: 13179 - protein, 12 aa, synthetic construct
AAASASRTIGSL

SEQ ID NO: 13180 - protein, 8 aa, synthetic construct
QTLPLTVL

SEQ ID NO: 13181 - protein, 9 aa, synthetic construct
YEVPSVAAA

SEQ ID NO: 13182 - protein, 9 aa, synthetic construct
VPSLGAEAY

SEQ ID NO: 13183 - protein, 8 aa, synthetic construct
YSEKGLVY

SEQ ID NO: 13184 - protein, 11 aa, synthetic construct
SIVPGPAAPPQ

SEQ ID NO: 13185 - protein, 12 aa, synthetic construct
GLGSPPLPAPAG

SEQ ID NO: 13186 - protein, 11 aa, synthetic construct
PGSLGLPPPQA

SEQ ID NO: 13187 - protein, 9 aa, synthetic construct
AVAAAVFIY

SEQ ID NO: 13188 - protein, 8 aa, synthetic construct
SKMVTVLS

SEQ ID NO: 13189 - protein, 9 aa, synthetic construct
LQLGYEGFS

SEQ ID NO: 13190 - protein, 11 aa, synthetic construct
PSVLQGEVARL

SEQ ID NO: 13191 - protein, 8 aa, synthetic construct
QLAVVEPY

SEQ ID NO: 13192 - protein, 8 aa, synthetic construct
QLRPAAFL

SEQ ID NO: 13193 - protein, 10 aa, synthetic construct
LGAWEEADSF

SEQ ID NO: 13194 - protein, 10 aa, synthetic construct
FTGIPAMVDF

SEQ ID NO: 13195 - protein, 9 aa, synthetic construct
AAMEKLSSI

SEQ ID NO: 13196 - protein, 8 aa, synthetic construct
CLSSLGAL

SEQ ID NO: 13197 - protein, 10 aa, synthetic construct
AAMSFLTILQ

SEQ ID NO: 13198 - protein, 9 aa, synthetic construct
LPGVVMALV

SEQ ID NO: 13199 - protein, 11 aa, synthetic construct
AAMAGSLSARG

SEQ ID NO: 13200 - protein, 9 aa, synthetic construct
AYCYEKVCK

SEQ ID NO: 13201 - protein, 9 aa, synthetic construct
VKKIALSDA

SEQ ID NO: 13202 - protein, 8 aa, synthetic construct
GEFGIVHR

SEQ ID NO: 13203 - protein, 9 aa, synthetic construct
SADFSSYLL

SEQ ID NO: 13204 - protein, 11 aa, synthetic construct
EHFVIKLIGGN

SEQ ID NO: 13205 - protein, 11 aa, synthetic construct
VAENFVPPLLD

SEQ ID NO: 13206 - protein, 11 aa, synthetic construct
TPTNPTQKVID

SEQ ID NO: 13207 - protein, 11 aa, synthetic construct
DLEMAAGLTDI

SEQ ID NO: 13208 - protein, 12 aa, synthetic construct
PLPPSPHSSPPS

SEQ ID NO: 13209 - protein, 9 aa, synthetic construct
VEGIFPSTG

SEQ ID NO: 13210 - protein, 12 aa, synthetic construct
EAEDLQVGQVEL

SEQ ID NO: 13211 - protein, 9 aa, synthetic construct
AAEFAGIAG

SEQ ID NO: 13212 - protein, 11 aa, synthetic construct
SAVMTLGGAAA

SEQ ID NO: 13213 - protein, 9 aa, synthetic construct
EAAVAVVAA

SEQ ID NO: 13214 - protein, 11 aa, synthetic construct
QVSTTSSLLEF

SEQ ID NO: 13215 - protein, 9 aa, synthetic construct
AEDVDALLL

SEQ ID NO: 13216 - protein, 9 aa, synthetic construct
AEAFQSLRR

SEQ ID NO: 13217 - protein, 10 aa, synthetic construct
AEEAFFRGVS

SEQ ID NO: 13218 - protein, 10 aa, synthetic construct
AAFEVSAALG

SEQ ID NO: 13219 - protein, 9 aa, synthetic construct
AAEPLGASV

SEQ ID NO: 13220 - protein, 10 aa, synthetic construct
AEALLQAGAN

SEQ ID NO: 13221 - protein, 9 aa, synthetic construct
LAAEPEPVV

SEQ ID NO: 13222 - protein, 10 aa, synthetic construct
EAVGKVSVYL

SEQ ID NO: 13223 - protein, 9 aa, synthetic construct
EAHTDLKES

SEQ ID NO: 13224 - protein, 9 aa, synthetic construct
ALQSFFETS

SEQ ID NO: 13225 - protein, 9 aa, synthetic construct
VNGLADYCA

SEQ ID NO: 13226 - protein, 8 aa, synthetic construct
VLDSAFEQ

SEQ ID NO: 13227 - protein, 8 aa, synthetic construct
FNQVDSVL

SEQ ID NO: 13228 - protein, 9 aa, synthetic construct
PSSPPPATL

SEQ ID NO: 13229 - protein, 9 aa, synthetic construct
EAARTLEKV

SEQ ID NO: 13230 - protein, 10 aa, synthetic construct
AELKMRAIQA

SEQ ID NO: 13231 - protein, 11 aa, synthetic construct
MPGTLQAADAA

SEQ ID NO: 13232 - protein, 8 aa, synthetic construct
FLQEASEV

SEQ ID NO: 13233 - protein, 9 aa, synthetic construct
AECQAAMLR

SEQ ID NO: 13234 - protein, 9 aa, synthetic construct
NEEIGLLLA

SEQ ID NO: 13235 - protein, 10 aa, synthetic construct
AEDGKGFLAK

SEQ ID NO: 13236 - protein, 9 aa, synthetic construct
LEPDAVQVT

SEQ ID NO: 13237 - protein, 10 aa, synthetic construct
AEDVKKTLDG

SEQ ID NO: 13238 - protein, 10 aa, synthetic construct
AECFLLAVMS

SEQ ID NO: 13239 - protein, 9 aa, synthetic construct
IVAEFDSFV

SEQ ID NO: 13240 - protein, 10 aa, synthetic construct
AVTDFDFIVT

SEQ ID NO: 13241 - protein, 9 aa, synthetic construct
LTEVSMFAS

SEQ ID NO: 13242 - protein, 9 aa, synthetic construct
EEFEAFVAA

SEQ ID NO: 13243 - protein, 9 aa, synthetic construct
EAFEKHYLD

SEQ ID NO: 13244 - protein, 10 aa, synthetic construct
EIGISFHEAE

SEQ ID NO: 13245 - protein, 10 aa, synthetic construct
AEFHSKAVEN

SEQ ID NO: 13246 - protein, 9 aa, synthetic construct
ISFLKLFEA

SEQ ID NO: 13247 - protein, 9 aa, synthetic construct
ISIMSLFKI

SEQ ID NO: 13248 - protein, 9 aa, synthetic construct
LFEAQYLAQ

SEQ ID NO: 13249 - protein, 10 aa, synthetic construct
LFSSPGKLLP

SEQ ID NO: 13250 - protein, 10 aa, synthetic construct
KSNSSAVPSD

SEQ ID NO: 13251 - protein, 9 aa, synthetic construct
TSCLPDTFT

SEQ ID NO: 13252 - protein, 10 aa, synthetic construct
EGTKEMFSLS

SEQ ID NO: 13253 - protein, 10 aa, synthetic construct
KMELEGKLEA

SEQ ID NO: 13254 - protein, 10 aa, synthetic construct
SYPQRRSGGP

SEQ ID NO: 13255 - protein, 9 aa, synthetic construct
SLMQLKVTA

SEQ ID NO: 13256 - protein, 9 aa, synthetic construct
AGEAFPQAV

SEQ ID NO: 13257 - protein, 10 aa, synthetic construct
AEGDLGPSWV

SEQ ID NO: 13258 - protein, 9 aa, synthetic construct
GKVPCGEHF

SEQ ID NO: 13259 - protein, 10 aa, synthetic construct
EAEAAALGQR

SEQ ID NO: 13260 - protein, 9 aa, synthetic construct
QELLMNVQW

SEQ ID NO: 13261 - protein, 8 aa, synthetic construct
QETLCITA

SEQ ID NO: 13262 - protein, 8 aa, synthetic construct
QQMPSVLP

SEQ ID NO: 13263 - protein, 8 aa, synthetic construct
VEQPVAVV

SEQ ID NO: 13264 - protein, 9 aa, synthetic construct
AERYHAISA

SEQ ID NO: 13265 - protein, 10 aa, synthetic construct
WANRHRELEA

SEQ ID NO: 13266 - protein, 9 aa, synthetic construct
AEHFLARSL

SEQ ID NO: 13267 - protein, 9 aa, synthetic construct
EAHFMLQVA

SEQ ID NO: 13268 - protein, 9 aa, synthetic construct
EARKSWPMG

SEQ ID NO: 13269 - protein, 10 aa, synthetic construct
SRGAEGPLPP

SEQ ID NO: 13270 - protein, 10 aa, synthetic construct
LTFSGLHAEA

SEQ ID NO: 13271 - protein, 11 aa, synthetic construct
QALNILTGKDW

SEQ ID NO: 13272 - protein, 9 aa, synthetic construct
LAEAEKSQL

SEQ ID NO: 13273 - protein, 9 aa, synthetic construct
EALAQLMLS

SEQ ID NO: 13274 - protein, 11 aa, synthetic construct
LQEAALPVAAA

SEQ ID NO: 13275 - protein, 10 aa, synthetic construct
AVHGLELEAL

SEQ ID NO: 13276 - protein, 10 aa, synthetic construct
AAASPCPLPP

SEQ ID NO: 13277 - protein, 9 aa, synthetic construct
EALEAELQA

SEQ ID NO: 13278 - protein, 10 aa, synthetic construct
APTREGVENA

SEQ ID NO: 13279 - protein, 10 aa, synthetic construct
VIVDGIVANA

SEQ ID NO: 13280 - protein, 11 aa, synthetic construct
AGKLTVVILEA

SEQ ID NO: 13281 - protein, 11 aa, synthetic construct
AAEILELAGNA

SEQ ID NO: 13282 - protein, 11 aa, synthetic construct
AEGNKLLAPVA

SEQ ID NO: 13283 - protein, 9 aa, synthetic construct
ILQDPAEVS

SEQ ID NO: 13284 - protein, 10 aa, synthetic construct
VDVFPKSLGP

SEQ ID NO: 13285 - protein, 10 aa, synthetic construct
AGLEAVGAVE

SEQ ID NO: 13286 - protein, 9 aa, synthetic construct
VKMTFVIVT

SEQ ID NO: 13287 - protein, 10 aa, synthetic construct
VLNKNHLVTL

SEQ ID NO: 13288 - protein, 12 aa, synthetic construct
VLSDGGIHNIST

SEQ ID NO: 13289 - protein, 11 aa, synthetic construct
EALSQHLQSSL

SEQ ID NO: 13290 - protein, 9 aa, synthetic construct
EALSSQLSV

SEQ ID NO: 13291 - protein, 10 aa, synthetic construct
AKILAGYDLA

SEQ ID NO: 13292 - protein, 11 aa, synthetic construct
LLLGFNSSLAA

SEQ ID NO: 13293 - protein, 10 aa, synthetic construct
EAFIMSQDVA

SEQ ID NO: 13294 - protein, 10 aa, synthetic construct
DLAAEVITEA

SEQ ID NO: 13295 - protein, 10 aa, synthetic construct
LDALDSFGST

SEQ ID NO: 13296 - protein, 9 aa, synthetic construct
AMISLEIPQ

SEQ ID NO: 13297 - protein, 10 aa, synthetic construct
EALVEALAAA

SEQ ID NO: 13298 - protein, 9 aa, synthetic construct
AELEARLNL

SEQ ID NO: 13299 - protein, 11 aa, synthetic construct
AELAVATLNSQ

SEQ ID NO: 13300 - protein, 9 aa, synthetic construct
LAELFSLVP

SEQ ID NO: 13301 - protein, 10 aa, synthetic construct
AIANEQLIAT

SEQ ID NO: 13302 - protein, 9 aa, synthetic construct
LAELPIIVV

SEQ ID NO: 13303 - protein, 10 aa, synthetic construct
EAALRGLLGA

SEQ ID NO: 13304 - protein, 9 aa, synthetic construct
SKPREFALA

SEQ ID NO: 13305 - protein, 9 aa, synthetic construct
QSIEAPLTA

SEQ ID NO: 13306 - protein, 10 aa, synthetic construct
AELSMGPELP

SEQ ID NO: 13307 - protein, 11 aa, synthetic construct
SQAGSFSLSTA

SEQ ID NO: 13308 - protein, 10 aa, synthetic construct
MEALQKQQAA

SEQ ID NO: 13309 - protein, 10 aa, synthetic construct
SEGFAVIKEA

SEQ ID NO: 13310 - protein, 10 aa, synthetic construct
AEFADGLLSK

SEQ ID NO: 13311 - protein, 9 aa, synthetic construct
AENKLYLAE

SEQ ID NO: 13312 - protein, 10 aa, synthetic construct
EAGGSLEFKL

SEQ ID NO: 13313 - protein, 11 aa, synthetic construct
AEFQDVRFKPG

SEQ ID NO: 13314 - protein, 11 aa, synthetic construct
LSLTFELRDEA

SEQ ID NO: 13315 - protein, 11 aa, synthetic construct
AEENFSRIKIS

SEQ ID NO: 13316 - protein, 11 aa, synthetic construct
YITLLNELDEA

SEQ ID NO: 13317 - protein, 9 aa, synthetic construct
LIGAEENVA

SEQ ID NO: 13318 - protein, 11 aa, synthetic construct
GVEAEAGVVVA

SEQ ID NO: 13319 - protein, 9 aa, synthetic construct
QGFEVALGA

SEQ ID NO: 13320 - protein, 9 aa, synthetic construct
LNDAQDIIV

SEQ ID NO: 13321 - protein, 10 aa, synthetic construct
EAYFGGQLVS

SEQ ID NO: 13322 - protein, 10 aa, synthetic construct
QNDVLEVIEA

SEQ ID NO: 13323 - protein, 9 aa, synthetic construct
SQQTLDSKY

SEQ ID NO: 13324 - protein, 12 aa, synthetic construct
ETRAQGPAGQEA

SEQ ID NO: 13325 - protein, 10 aa, synthetic construct
QASTPAITGP

SEQ ID NO: 13326 - protein, 10 aa, synthetic construct
EAGAGRCSFL

SEQ ID NO: 13327 - protein, 10 aa, synthetic construct
DFKANQEILP

SEQ ID NO: 13328 - protein, 9 aa, synthetic construct
PYFHSLLLA

SEQ ID NO: 13329 - protein, 8 aa, synthetic construct
GWERYTEV

SEQ ID NO: 13330 - protein, 9 aa, synthetic construct
LSSPSNMLP

SEQ ID NO: 13331 - protein, 9 aa, synthetic construct
TVTYPWMST

SEQ ID NO: 13332 - protein, 9 aa, synthetic construct
EASLPMKLN

SEQ ID NO: 13333 - protein, 9 aa, synthetic construct
SEAGPVAVP

SEQ ID NO: 13334 - protein, 9 aa, synthetic construct
AETPDLFKL

SEQ ID NO: 13335 - protein, 10 aa, synthetic construct
AEANLQPHIV

SEQ ID NO: 13336 - protein, 9 aa, synthetic construct
FEHHFPLSA

SEQ ID NO: 13337 - protein, 9 aa, synthetic construct
ADIAKMPAI

SEQ ID NO: 13338 - protein, 9 aa, synthetic construct
EAANGLMAA

SEQ ID NO: 13339 - protein, 9 aa, synthetic construct
VSYPPPLGP

SEQ ID NO: 13340 - protein, 9 aa, synthetic construct
EGLVRGLQV

SEQ ID NO: 13341 - protein, 10 aa, synthetic construct
EGLLLGATAG

SEQ ID NO: 13342 - protein, 10 aa, synthetic construct
ALDLLDHMLT

SEQ ID NO: 13343 - protein, 10 aa, synthetic construct
EGILVQETGL

SEQ ID NO: 13344 - protein, 10 aa, synthetic construct
RMLPHFSTWL

SEQ ID NO: 13345 - protein, 10 aa, synthetic construct
KQAYYKSTWI

SEQ ID NO: 13346 - protein, 11 aa, synthetic construct
PLVCKVNGTWL

SEQ ID NO: 13347 - protein, 11 aa, synthetic construct
QDSRVLVGREV

SEQ ID NO: 13348 - protein, 11 aa, synthetic construct
PSRPMIVGRDL

SEQ ID NO: 13349 - protein, 9 aa, synthetic construct
EVGLEDLAA

SEQ ID NO: 13350 - protein, 8 aa, synthetic construct
AEVDVRER

SEQ ID NO: 13351 - protein, 8 aa, synthetic construct
AEENRTKL

SEQ ID NO: 13352 - protein, 8 aa, synthetic construct
IKKPRESE

SEQ ID NO: 13353 - protein, 9 aa, synthetic construct
AEYQARINV

SEQ ID NO: 13354 - protein, 10 aa, synthetic construct
AEYEQAMTEK

SEQ ID NO: 13355 - protein, 12 aa, synthetic construct
AEYEGVMNQGVA

SEQ ID NO: 13356 - protein, 14 aa, synthetic construct
EAAGTAIGGFEGAA

SEQ ID NO: 13357 - protein, 11 aa, synthetic construct
EAMTVQADIIP

SEQ ID NO: 13358 - protein, 7 aa, synthetic construct
AEEYFRM

SEQ ID NO: 13359 - protein, 10 aa, synthetic construct
SPHTSGCLFV

SEQ ID NO: 13360 - protein, 9 aa, synthetic construct
EAYGQKDLL

SEQ ID NO: 13361 - protein, 9 aa, synthetic construct
VFNPMSQDL

SEQ ID NO: 13362 - protein, 8 aa, synthetic construct
AEYKRYLE

SEQ ID NO: 13363 - protein, 10 aa, synthetic construct
QLGCGEALIA

SEQ ID NO: 13364 - protein, 9 aa, synthetic construct
AEYLERRDR

SEQ ID NO: 13365 - protein, 10 aa, synthetic construct
QKHTVEFNQL

SEQ ID NO: 13366 - protein, 8 aa, synthetic construct
AEYRIQVH

SEQ ID NO: 13367 - protein, 11 aa, synthetic construct
TSPHAPGFPAE

SEQ ID NO: 13368 - protein, 10 aa, synthetic construct
QASSICILAA

SEQ ID NO: 13369 - protein, 9 aa, synthetic construct
LDPMIAQGK

SEQ ID NO: 13370 - protein, 10 aa, synthetic construct
ATAVEGGRDL

SEQ ID NO: 13371 - protein, 9 aa, synthetic construct
LEAADFAEL

SEQ ID NO: 13372 - protein, 9 aa, synthetic construct
AFDLDVFKN

SEQ ID NO: 13373 - protein, 10 aa, synthetic construct
FADSISKGLM

SEQ ID NO: 13374 - protein, 9 aa, synthetic construct
MSVLISRYI

SEQ ID NO: 13375 - protein, 9 aa, synthetic construct
AFDRGVRKA

SEQ ID NO: 13376 - protein, 10 aa, synthetic construct
AFDLYTRGAE

SEQ ID NO: 13377 - protein, 9 aa, synthetic construct
FADGLDITL

SEQ ID NO: 13378 - protein, 10 aa, synthetic construct
DLGFHVAGAF

SEQ ID NO: 13379 - protein, 10 aa, synthetic construct
YQVVAFLAMV

SEQ ID NO: 13380 - protein, 10 aa, synthetic construct
GVLADFEGGF

SEQ ID NO: 13381 - protein, 8 aa, synthetic construct
AFEELFGI

SEQ ID NO: 13382 - protein, 10 aa, synthetic construct
FAFGSWKVKT

SEQ ID NO: 13383 - protein, 10 aa, synthetic construct
AFLEKAEPEC

SEQ ID NO: 13384 - protein, 8 aa, synthetic construct
ALCKEERE

SEQ ID NO: 13385 - protein, 10 aa, synthetic construct
LRNPGLNITA

SEQ ID NO: 13386 - protein, 9 aa, synthetic construct
AFRLKPSLL

SEQ ID NO: 13387 - protein, 11 aa, synthetic construct
TTMALLTIMEF

SEQ ID NO: 13388 - protein, 10 aa, synthetic construct
PMPMPMPMLS

SEQ ID NO: 13389 - protein, 9 aa, synthetic construct
AFVACWGPL

SEQ ID NO: 13390 - protein, 10 aa, synthetic construct
GSMSPSRVEA

SEQ ID NO: 13391 - protein, 10 aa, synthetic construct
AFVPAPCATS

SEQ ID NO: 13392 - protein, 10 aa, synthetic construct
QDGLISGILR

SEQ ID NO: 13393 - protein, 8 aa, synthetic construct
EPEQGTLY

SEQ ID NO: 13394 - protein, 7 aa, synthetic construct
QDVHRVL

SEQ ID NO: 13395 - protein, 8 aa, synthetic construct
AGDVRVLH

SEQ ID NO: 13396 - protein, 8 aa, synthetic construct
GAEDPLGA

SEQ ID NO: 13397 - protein, 9 aa, synthetic construct
SQLEGGTKD

SEQ ID NO: 13398 - protein, 7 aa, synthetic construct
HMKTPEE

SEQ ID NO: 13399 - protein, 8 aa, synthetic construct
TLSPDPEE

SEQ ID NO: 13400 - protein, 8 aa, synthetic construct
HMKTPEEE

SEQ ID NO: 13401 - protein, 9 aa, synthetic construct
VEVEGPEEE

SEQ ID NO: 13402 - protein, 9 aa, synthetic construct
GCREETAPP

SEQ ID NO: 13403 - protein, 9 aa, synthetic construct
SDPITRDHM

SEQ ID NO: 13404 - protein, 10 aa, synthetic construct
QFMSPEPPAT

SEQ ID NO: 13405 - protein, 12 aa, synthetic construct
DEVSSPSTPEAP

SEQ ID NO: 13406 - protein, 11 aa, synthetic construct
SDPITRDHMGS

SEQ ID NO: 13407 - protein, 8 aa, synthetic construct
AGAFILTL

SEQ ID NO: 13408 - protein, 9 aa, synthetic construct
KMQVRGAAL

SEQ ID NO: 13409 - protein, 12 aa, synthetic construct
AGAAALALTVDL

SEQ ID NO: 13410 - protein, 8 aa, synthetic construct
GAGYDEVK

SEQ ID NO: 13411 - protein, 8 aa, synthetic construct
EKAGESAN

SEQ ID NO: 13412 - protein, 9 aa, synthetic construct
GAPGPGLGL

SEQ ID NO: 13413 - protein, 13 aa, synthetic construct
AGPPAKMAAAGPG

SEQ ID NO: 13414 - protein, 11 aa, synthetic construct
AGGLEAAALSL

SEQ ID NO: 13415 - protein, 9 aa, synthetic construct
GASEPPLSL

SEQ ID NO: 13416 - protein, 10 aa, synthetic construct
QPCKAGTTRF

SEQ ID NO: 13417 - protein, 10 aa, synthetic construct
AGVGAAALSL

SEQ ID NO: 13418 - protein, 10 aa, synthetic construct
GAPRMGASLL

SEQ ID NO: 13419 - protein, 14 aa, synthetic construct
RGKVPPGAGPGSPL

SEQ ID NO: 13420 - protein, 13 aa, synthetic construct
LPPEAKPASGLPL

SEQ ID NO: 13421 - protein, 12 aa, synthetic construct
LLPDSPLPDLPL

SEQ ID NO: 13422 - protein, 8 aa, synthetic construct
VQHFRTIY

SEQ ID NO: 13423 - protein, 9 aa, synthetic construct
AGMKIQLVC

SEQ ID NO: 13424 - protein, 10 aa, synthetic construct
PVSTMLVVSS

SEQ ID NO: 13425 - protein, 7 aa, synthetic construct
QMARRAR

SEQ ID NO: 13426 - protein, 9 aa, synthetic construct
NLTPQNQHA

SEQ ID NO: 13427 - protein, 11 aa, synthetic construct
AHISWLVALSS

SEQ ID NO: 13428 - protein, 7 aa, synthetic construct
AHIILER

SEQ ID NO: 13429 - protein, 8 aa, synthetic construct
HALSKPKA

SEQ ID NO: 13430 - protein, 8 aa, synthetic construct
AHLGKLNV

SEQ ID NO: 13431 - protein, 11 aa, synthetic construct
EPGLFEPPPAV

SEQ ID NO: 13432 - protein, 8 aa, synthetic construct
HALPIPVI

SEQ ID NO: 13433 - protein, 10 aa, synthetic construct
QEDMPTNPAI

SEQ ID NO: 13434 - protein, 9 aa, synthetic construct
LIAPALAAV

SEQ ID NO: 13435 - protein, 9 aa, synthetic construct
LALRNTLVL

SEQ ID NO: 13436 - protein, 8 aa, synthetic construct
QLEALTVS

SEQ ID NO: 13437 - protein, 9 aa, synthetic construct
ALDKIDQQY

SEQ ID NO: 13438 - protein, 10 aa, synthetic construct
AIDLIFKSNS

SEQ ID NO: 13439 - protein, 10 aa, synthetic construct
AVETRNNNLA

SEQ ID NO: 13440 - protein, 12 aa, synthetic construct
LANGLAMAGSPV

SEQ ID NO: 13441 - protein, 9 aa, synthetic construct
ALALFGGNG

SEQ ID NO: 13442 - protein, 9 aa, synthetic construct
ALFQNLSKL

SEQ ID NO: 13443 - protein, 9 aa, synthetic construct
ALFSMDKVR

SEQ ID NO: 13444 - protein, 9 aa, synthetic construct
AIGDYPNAL

SEQ ID NO: 13445 - protein, 10 aa, synthetic construct
IALDHGFTIK

SEQ ID NO: 13446 - protein, 10 aa, synthetic construct
ALLSLQTAFF

SEQ ID NO: 13447 - protein, 8 aa, synthetic construct
AILMNFIS

SEQ ID NO: 13448 - protein, 9 aa, synthetic construct
LALYNTALK

SEQ ID NO: 13449 - protein, 9 aa, synthetic construct
LADKFLKTA

SEQ ID NO: 13450 - protein, 9 aa, synthetic construct
AILQSPHKR

SEQ ID NO: 13451 - protein, 10 aa, synthetic construct
IASNGSLLKV

SEQ ID NO: 13452 - protein, 13 aa, synthetic construct
AIDMAGFAVSLQV

SEQ ID NO: 13453 - protein, 11 aa, synthetic construct
LAVMNTSLFYF

SEQ ID NO: 13454 - protein, 11 aa, synthetic construct
VDSRPLTQVGG

SEQ ID NO: 13455 - protein, 11 aa, synthetic construct
LALIIMKILPK

SEQ ID NO: 13456 - protein, 9 aa, synthetic construct
LAMNRAGSI

SEQ ID NO: 13457 - protein, 9 aa, synthetic construct
TSMKVIYLA

SEQ ID NO: 13458 - protein, 9 aa, synthetic construct
ALILSQPVS

SEQ ID NO: 13459 - protein, 9 aa, synthetic construct
LAVVQPTTV

SEQ ID NO: 13460 - protein, 8 aa, synthetic construct
ALVMALFK

SEQ ID NO: 13461 - protein, 10 aa, synthetic construct
PPGAAKPALA

SEQ ID NO: 13462 - protein, 10 aa, synthetic construct
AYIKTVMIAL

SEQ ID NO: 13463 - protein, 11 aa, synthetic construct
ALYTAAVAAFV

SEQ ID NO: 13464 - protein, 10 aa, synthetic construct
IPSPKHSFLA

SEQ ID NO: 13465 - protein, 9 aa, synthetic construct
AISVFRGYA

SEQ ID NO: 13466 - protein, 9 aa, synthetic construct
VEMVLKVIA

SEQ ID NO: 13467 - protein, 10 aa, synthetic construct
IAGSTKDVKV

SEQ ID NO: 13468 - protein, 11 aa, synthetic construct
PAGAAKKPKKA

SEQ ID NO: 13469 - protein, 9 aa, synthetic construct
AKTDGAQKA

SEQ ID NO: 13470 - protein, 8 aa, synthetic construct
ALNEINKV

SEQ ID NO: 13471 - protein, 9 aa, synthetic construct
EQLAALSQA

SEQ ID NO: 13472 - protein, 9 aa, synthetic construct
DLAVDVEQV

SEQ ID NO: 13473 - protein, 9 aa, synthetic construct
VEELAAEVQ

SEQ ID NO: 13474 - protein, 10 aa, synthetic construct
LAAEISALQL

SEQ ID NO: 13475 - protein, 10 aa, synthetic construct
ALAEREPALQ

SEQ ID NO: 13476 - protein, 8 aa, synthetic construct
LANLSFLE

SEQ ID NO: 13477 - protein, 10 aa, synthetic construct
LAALKKALAA

SEQ ID NO: 13478 - protein, 9 aa, synthetic construct
LAAAVPTAP

SEQ ID NO: 13479 - protein, 9 aa, synthetic construct
LGPAALPAT

SEQ ID NO: 13480 - protein, 10 aa, synthetic construct
LAATLHVALG

SEQ ID NO: 13481 - protein, 9 aa, synthetic construct
AKLSISTIA

SEQ ID NO: 13482 - protein, 9 aa, synthetic construct
ALVCEKELY

SEQ ID NO: 13483 - protein, 9 aa, synthetic construct
VDGVGLALY

SEQ ID NO: 13484 - protein, 9 aa, synthetic construct
LSMDALDLT

SEQ ID NO: 13485 - protein, 9 aa, synthetic construct
AIDFIDSIK

SEQ ID NO: 13486 - protein, 8 aa, synthetic construct
VILNEFFV

SEQ ID NO: 13487 - protein, 9 aa, synthetic construct
ALADKISIL

SEQ ID NO: 13488 - protein, 9 aa, synthetic construct
LLANSTVLL

SEQ ID NO: 13489 - protein, 9 aa, synthetic construct
LGSASPLVS

SEQ ID NO: 13490 - protein, 9 aa, synthetic construct
ALDLPQGTL

SEQ ID NO: 13491 - protein, 8 aa, synthetic construct
EVKDYLAA

SEQ ID NO: 13492 - protein, 13 aa, synthetic construct
EGVSTPLAGRGLA

SEQ ID NO: 13493 - protein, 10 aa, synthetic construct
LLDATQHTLQ

SEQ ID NO: 13494 - protein, 11 aa, synthetic construct
KASASGSGAQV

SEQ ID NO: 13495 - protein, 9 aa, synthetic construct
KNAVLFEAI

SEQ ID NO: 13496 - protein, 8 aa, synthetic construct
AQLFIFLA

SEQ ID NO: 13497 - protein, 9 aa, synthetic construct
LLAFAGLFA

SEQ ID NO: 13498 - protein, 8 aa, synthetic construct
SVLMLAWI

SEQ ID NO: 13499 - protein, 8 aa, synthetic construct
IFQARTAI

SEQ ID NO: 13500 - protein, 9 aa, synthetic construct
LRPGRQPAL

SEQ ID NO: 13501 - protein, 9 aa, synthetic construct
IAFGIFRAI

SEQ ID NO: 13502 - protein, 9 aa, synthetic construct
ALVLCRLPL

SEQ ID NO: 13503 - protein, 10 aa, synthetic construct
LAICITSLWT

SEQ ID NO: 13504 - protein, 11 aa, synthetic construct
EVMREAAFSLA

SEQ ID NO: 13505 - protein, 11 aa, synthetic construct
ATVFPMDKMIA

SEQ ID NO: 13506 - protein, 10 aa, synthetic construct
ALFFQLCTQQ

SEQ ID NO: 13507 - protein, 11 aa, synthetic construct
SYMGIRDTELA

SEQ ID NO: 13508 - protein, 12 aa, synthetic construct
NEKPSGHSSKQG

SEQ ID NO: 13509 - protein, 9 aa, synthetic construct
VGATLTGVG

SEQ ID NO: 13510 - protein, 10 aa, synthetic construct
AHLLNDALAI

SEQ ID NO: 13511 - protein, 9 aa, synthetic construct
LHLHARLAL

SEQ ID NO: 13512 - protein, 11 aa, synthetic construct
QITTATALICV

SEQ ID NO: 13513 - protein, 9 aa, synthetic construct
ALELKLLDL

SEQ ID NO: 13514 - protein, 9 aa, synthetic construct
ALLHRGVAE

SEQ ID NO: 13515 - protein, 8 aa, synthetic construct
ALIDHQRI

SEQ ID NO: 13516 - protein, 9 aa, synthetic construct
LALIPETTT

SEQ ID NO: 13517 - protein, 10 aa, synthetic construct
LLATRVGSIA

SEQ ID NO: 13518 - protein, 9 aa, synthetic construct
KKAGLKLAL

SEQ ID NO: 13519 - protein, 9 aa, synthetic construct
AILSARKTF

SEQ ID NO: 13520 - protein, 11 aa, synthetic construct
LAIKNIIPTKG

SEQ ID NO: 13521 - protein, 11 aa, synthetic construct
AIKLIVIRGAN

SEQ ID NO: 13522 - protein, 9 aa, synthetic construct
RRLQRRVAL

SEQ ID NO: 13523 - protein, 9 aa, synthetic construct
ALLKIQKSK

SEQ ID NO: 13524 - protein, 9 aa, synthetic construct
ALKKAGLSL

SEQ ID NO: 13525 - protein, 9 aa, synthetic construct
ALINLSSVN

SEQ ID NO: 13526 - protein, 8 aa, synthetic construct
AYALTLLR

SEQ ID NO: 13527 - protein, 8 aa, synthetic construct
YTALLAIR

SEQ ID NO: 13528 - protein, 10 aa, synthetic construct
IALDELRSVF

SEQ ID NO: 13529 - protein, 11 aa, synthetic construct
ALLDLFSPSVT

SEQ ID NO: 13530 - protein, 9 aa, synthetic construct
IALDKLSLF

SEQ ID NO: 13531 - protein, 9 aa, synthetic construct
IAVERVISV

SEQ ID NO: 13532 - protein, 9 aa, synthetic construct
ILEGASHIL

SEQ ID NO: 13533 - protein, 9 aa, synthetic construct
ALIIDGHTL

SEQ ID NO: 13534 - protein, 11 aa, synthetic construct
LIAEDLDETSD

SEQ ID NO: 13535 - protein, 9 aa, synthetic construct
LALINSLKV

SEQ ID NO: 13536 - protein, 9 aa, synthetic construct
LAASVAFQL

SEQ ID NO: 13537 - protein, 7 aa, synthetic construct
AILIEND

SEQ ID NO: 13538 - protein, 7 aa, synthetic construct
IAELLDN

SEQ ID NO: 13539 - protein, 8 aa, synthetic construct
LLALEGDG

SEQ ID NO: 13540 - protein, 9 aa, synthetic construct
ALLAQTKFG

SEQ ID NO: 13541 - protein, 9 aa, synthetic construct
ALLAEAPTL

SEQ ID NO: 13542 - protein, 9 aa, synthetic construct
GLIFLMVLY

SEQ ID NO: 13543 - protein, 10 aa, synthetic construct
LLALRGEAAL

SEQ ID NO: 13544 - protein, 10 aa, synthetic construct
LLARNAAHAL

SEQ ID NO: 13545 - protein, 9 aa, synthetic construct
LALAASFLL

SEQ ID NO: 13546 - protein, 12 aa, synthetic construct
ALASGKIAAAGL

SEQ ID NO: 13547 - protein, 9 aa, synthetic construct
ALLSCRLGT

SEQ ID NO: 13548 - protein, 9 aa, synthetic construct
LQGAWRQAL

SEQ ID NO: 13549 - protein, 10 aa, synthetic construct
ALNAVHSFIA

SEQ ID NO: 13550 - protein, 9 aa, synthetic construct
AGQLIALLY

SEQ ID NO: 13551 - protein, 9 aa, synthetic construct
LAQEVKVNI

SEQ ID NO: 13552 - protein, 10 aa, synthetic construct
AIEVQGHGLI

SEQ ID NO: 13553 - protein, 10 aa, synthetic construct
TGQAPLALAI

SEQ ID NO: 13554 - protein, 8 aa, synthetic construct
ETHCTIAI

SEQ ID NO: 13555 - protein, 9 aa, synthetic construct
AIEDMVASV

SEQ ID NO: 13556 - protein, 9 aa, synthetic construct
APAELLAAL

SEQ ID NO: 13557 - protein, 9 aa, synthetic construct
LAARSCSLF

SEQ ID NO: 13558 - protein, 9 aa, synthetic construct
ALLPEFELT

SEQ ID NO: 13559 - protein, 9 aa, synthetic construct
LAGPESSVT

SEQ ID NO: 13560 - protein, 9 aa, synthetic construct
DPLSIAVEA

SEQ ID NO: 13561 - protein, 8 aa, synthetic construct
ALPLHALR

SEQ ID NO: 13562 - protein, 8 aa, synthetic construct
PHLALRLA

SEQ ID NO: 13563 - protein, 12 aa, synthetic construct
AIPLSGIIFSYS

SEQ ID NO: 13564 - protein, 8 aa, synthetic construct
PLAIKNAI

SEQ ID NO: 13565 - protein, 9 aa, synthetic construct
ALPLLRVWA

SEQ ID NO: 13566 - protein, 9 aa, synthetic construct
ALPTLIPSV

SEQ ID NO: 13567 - protein, 9 aa, synthetic construct
ASEERALAL

SEQ ID NO: 13568 - protein, 9 aa, synthetic construct
ALQIIDLFK

SEQ ID NO: 13569 - protein, 9 aa, synthetic construct
AVNDLGTEY

SEQ ID NO: 13570 - protein, 9 aa, synthetic construct
LHVPGPMAV

SEQ ID NO: 13571 - protein, 9 aa, synthetic construct
LGTALRTLA

SEQ ID NO: 13572 - protein, 9 aa, synthetic construct
LYLNGTDVL

SEQ ID NO: 13573 - protein, 9 aa, synthetic construct
VAVDYVEGI

SEQ ID NO: 13574 - protein, 9 aa, synthetic construct
ATVETAALV

SEQ ID NO: 13575 - protein, 9 aa, synthetic construct
ELDVFDGYL

SEQ ID NO: 13576 - protein, 9 aa, synthetic construct
AVSATLSGV

SEQ ID NO: 13577 - protein, 10 aa, synthetic construct
ALSLAQGLAF

SEQ ID NO: 13578 - protein, 10 aa, synthetic construct
LASALAAEKL

SEQ ID NO: 13579 - protein, 10 aa, synthetic construct
LNGSAVLKIA

SEQ ID NO: 13580 - protein, 9 aa, synthetic construct
VQDIASLTL

SEQ ID NO: 13581 - protein, 9 aa, synthetic construct
LNPDVPEAL

SEQ ID NO: 13582 - protein, 10 aa, synthetic construct
TLDVALLMGA

SEQ ID NO: 13583 - protein, 9 aa, synthetic construct
LAETLALLK

SEQ ID NO: 13584 - protein, 9 aa, synthetic construct
HFVGHTLYI

SEQ ID NO: 13585 - protein, 9 aa, synthetic construct
LALTEYTLY

SEQ ID NO: 13586 - protein, 9 aa, synthetic construct
SVVPALITL

SEQ ID NO: 13587 - protein, 10 aa, synthetic construct
ALVDLQLSAR

SEQ ID NO: 13588 - protein, 8 aa, synthetic construct
GLLDHTSY

SEQ ID NO: 13589 - protein, 10 aa, synthetic construct
AVAGDIIKAA

SEQ ID NO: 13590 - protein, 12 aa, synthetic construct
GGKGAGFDVKAL

SEQ ID NO: 13591 - protein, 10 aa, synthetic construct
AIQGLTMALK

SEQ ID NO: 13592 - protein, 9 aa, synthetic construct
AWLGEQELL

SEQ ID NO: 13593 - protein, 9 aa, synthetic construct
SVMLSTYET

SEQ ID NO: 13594 - protein, 10 aa, synthetic construct
ALYVVGSLDE

SEQ ID NO: 13595 - protein, 8 aa, synthetic construct
MFRRGYIA

SEQ ID NO: 13596 - protein, 9 aa, synthetic construct
EMKRMVSLA

SEQ ID NO: 13597 - protein, 10 aa, synthetic construct
FSLPSNPQAL

SEQ ID NO: 13598 - protein, 10 aa, synthetic construct
IAMIQKTEDT

SEQ ID NO: 13599 - protein, 8 aa, synthetic construct
IQYQLPLL

SEQ ID NO: 13600 - protein, 9 aa, synthetic construct
GFSLRAIRV

SEQ ID NO: 13601 - protein, 9 aa, synthetic construct
ALYFTRGLK

SEQ ID NO: 13602 - protein, 8 aa, synthetic construct
ALYNRFLF

SEQ ID NO: 13603 - protein, 8 aa, synthetic construct
IAYILYRK

SEQ ID NO: 13604 - protein, 9 aa, synthetic construct
IFSPNVVNL

SEQ ID NO: 13605 - protein, 10 aa, synthetic construct
AYIKMVDAAL

SEQ ID NO: 13606 - protein, 9 aa, synthetic construct
LELSFSLAV

SEQ ID NO: 13607 - protein, 9 aa, synthetic construct
VSFPLDMGY

SEQ ID NO: 13608 - protein, 8 aa, synthetic construct
NRVSCMYV

SEQ ID NO: 13609 - protein, 9 aa, synthetic construct
ISSPFMVVY

SEQ ID NO: 13610 - protein, 9 aa, synthetic construct
YVLGITMMV

SEQ ID NO: 13611 - protein, 9 aa, synthetic construct
ELGEMLLML

SEQ ID NO: 13612 - protein, 9 aa, synthetic construct
LAMLIIDLR

SEQ ID NO: 13613 - protein, 10 aa, synthetic construct
IADAFAIPAL

SEQ ID NO: 13614 - protein, 8 aa, synthetic construct
LAMHRFLA

SEQ ID NO: 13615 - protein, 9 aa, synthetic construct
VALMPVLNQ

SEQ ID NO: 13616 - protein, 11 aa, synthetic construct
LEAMTEKLQYL

SEQ ID NO: 13617 - protein, 14 aa, synthetic construct
KSIIGMGTGAGAYI

SEQ ID NO: 13618 - protein, 8 aa, synthetic construct
MAKSLYWL

SEQ ID NO: 13619 - protein, 7 aa, synthetic construct
MQLVTSL

SEQ ID NO: 13620 - protein, 10 aa, synthetic construct
SDISLIMAME

SEQ ID NO: 13621 - protein, 10 aa, synthetic construct
EYMLGGALLV

SEQ ID NO: 13622 - protein, 9 aa, synthetic construct
LSDCNKVTD

SEQ ID NO: 13623 - protein, 10 aa, synthetic construct
TVESLGETTD

SEQ ID NO: 13624 - protein, 8 aa, synthetic construct
QGKGIRVL

SEQ ID NO: 13625 - protein, 11 aa, synthetic construct
ANPAFAFGTLQ

SEQ ID NO: 13626 - protein, 9 aa, synthetic construct
AAPAVAPLT

SEQ ID NO: 13627 - protein, 10 aa, synthetic construct
APAAAVVRAA

SEQ ID NO: 13628 - protein, 10 aa, synthetic construct
PGAAALLFLI

SEQ ID NO: 13629 - protein, 9 aa, synthetic construct
APAFSHASL

SEQ ID NO: 13630 - protein, 10 aa, synthetic construct
APAPAGTTAI

SEQ ID NO: 13631 - protein, 10 aa, synthetic construct
PQKMLMPSQF

SEQ ID NO: 13632 - protein, 9 aa, synthetic construct
PAVAAALVL

SEQ ID NO: 13633 - protein, 9 aa, synthetic construct
FGDAPASLD

SEQ ID NO: 13634 - protein, 10 aa, synthetic construct
APAVEPKPAW

SEQ ID NO: 13635 - protein, 9 aa, synthetic construct
APATSLPKQ

SEQ ID NO: 13636 - protein, 9 aa, synthetic construct
APAEVALEI

SEQ ID NO: 13637 - protein, 9 aa, synthetic construct
APRMAGLPF

SEQ ID NO: 13638 - protein, 9 aa, synthetic construct
GKNSIDYIY

SEQ ID NO: 13639 - protein, 8 aa, synthetic construct
APLNRKGL

SEQ ID NO: 13640 - protein, 8 aa, synthetic construct
APQVFLNF

SEQ ID NO: 13641 - protein, 9 aa, synthetic construct
APPSKIHVL

SEQ ID NO: 13642 - protein, 9 aa, synthetic construct
ALPAPGLAP

SEQ ID NO: 13643 - protein, 11 aa, synthetic construct
APAPIHNQFPA

SEQ ID NO: 13644 - protein, 9 aa, synthetic construct
APAPLGTPV

SEQ ID NO: 13645 - protein, 9 aa, synthetic construct
APAPLSASI

SEQ ID NO: 13646 - protein, 9 aa, synthetic construct
AAPPTEVTI

SEQ ID NO: 13647 - protein, 10 aa, synthetic construct
APAPRHPPAP

SEQ ID NO: 13648 - protein, 9 aa, synthetic construct
APAESQRHV

SEQ ID NO: 13649 - protein, 10 aa, synthetic construct
APAPRSGTHT

SEQ ID NO: 13650 - protein, 9 aa, synthetic construct
APAFNSIFQ

SEQ ID NO: 13651 - protein, 9 aa, synthetic construct
APAQVHQFP

SEQ ID NO: 13652 - protein, 10 aa, synthetic construct
APAFVAAVAL

SEQ ID NO: 13653 - protein, 8 aa, synthetic construct
QKLPLVMI

SEQ ID NO: 13654 - protein, 9 aa, synthetic construct
APAPAAEGL

SEQ ID NO: 13655 - protein, 9 aa, synthetic construct
AAPPKQMPA

SEQ ID NO: 13656 - protein, 9 aa, synthetic construct
APASGYLTF

SEQ ID NO: 13657 - protein, 9 aa, synthetic construct
APAPTREAN

SEQ ID NO: 13658 - protein, 9 aa, synthetic construct
APAVTPAVL

SEQ ID NO: 13659 - protein, 9 aa, synthetic construct
APGPVSVVI

SEQ ID NO: 13660 - protein, 10 aa, synthetic construct
APARSPLLGI

SEQ ID NO: 13661 - protein, 9 aa, synthetic construct
APLRAMQGV

SEQ ID NO: 13662 - protein, 13 aa, synthetic construct
APAGTAPPPGPVP

SEQ ID NO: 13663 - protein, 8 aa, synthetic construct
QTTPLIEY

SEQ ID NO: 13664 - protein, 8 aa, synthetic construct
AVPATQIF

SEQ ID NO: 13665 - protein, 8 aa, synthetic construct
PTQLGLAF

SEQ ID NO: 13666 - protein, 9 aa, synthetic construct
PAYLPRSLA

SEQ ID NO: 13667 - protein, 9 aa, synthetic construct
GEARDEVPA

SEQ ID NO: 13668 - protein, 9 aa, synthetic construct
MCLALSEVM

SEQ ID NO: 13669 - protein, 10 aa, synthetic construct
APGKSPEEMY

SEQ ID NO: 13670 - protein, 12 aa, synthetic construct
VIFASPSPTPLL

SEQ ID NO: 13671 - protein, 12 aa, synthetic construct
DKAAAAAPTPPA

SEQ ID NO: 13672 - protein, 9 aa, synthetic construct
AVFFMAMIA

SEQ ID NO: 13673 - protein, 10 aa, synthetic construct
LDRKAVGTPA

SEQ ID NO: 13674 - protein, 11 aa, synthetic construct
APVVTRNTGLI

SEQ ID NO: 13675 - protein, 10 aa, synthetic construct
APADVRVGLL

SEQ ID NO: 13676 - protein, 9 aa, synthetic construct
LMADMVYVT

SEQ ID NO: 13677 - protein, 9 aa, synthetic construct
ASNGAYPVL

SEQ ID NO: 13678 - protein, 9 aa, synthetic construct
APAVYSGNL

SEQ ID NO: 13679 - protein, 9 aa, synthetic construct
APLAELRLL

SEQ ID NO: 13680 - protein, 9 aa, synthetic construct
APNLKILNL

SEQ ID NO: 13681 - protein, 11 aa, synthetic construct
AVSNIICSITF

SEQ ID NO: 13682 - protein, 9 aa, synthetic construct
LAMEISEIC

SEQ ID NO: 13683 - protein, 12 aa, synthetic construct
LPASASQSAGII

SEQ ID NO: 13684 - protein, 8 aa, synthetic construct
DTRMAEEY

SEQ ID NO: 13685 - protein, 9 aa, synthetic construct
MAPGSFAEY

SEQ ID NO: 13686 - protein, 10 aa, synthetic construct
ALMHYKEAIR

SEQ ID NO: 13687 - protein, 11 aa, synthetic construct
QARAAGLLSTY

SEQ ID NO: 13688 - protein, 9 aa, synthetic construct
AERVRSVEL

SEQ ID NO: 13689 - protein, 9 aa, synthetic construct
APFSPESWY

SEQ ID NO: 13690 - protein, 10 aa, synthetic construct
APFQVRQESG

SEQ ID NO: 13691 - protein, 9 aa, synthetic construct
ATLWDLSCF

SEQ ID NO: 13692 - protein, 10 aa, synthetic construct
APPLISPPAF

SEQ ID NO: 13693 - protein, 8 aa, synthetic construct
AMLTQTSL

SEQ ID NO: 13694 - protein, 11 aa, synthetic construct
GAAAGSSTLSF

SEQ ID NO: 13695 - protein, 10 aa, synthetic construct
SSAGKVTFPV

SEQ ID NO: 13696 - protein, 9 aa, synthetic construct
PAQPAGLAL

SEQ ID NO: 13697 - protein, 10 aa, synthetic construct
PAPHMTLGPA

SEQ ID NO: 13698 - protein, 9 aa, synthetic construct
KEALMTMPA

SEQ ID NO: 13699 - protein, 8 aa, synthetic construct
APDASQLM

SEQ ID NO: 13700 - protein, 10 aa, synthetic construct
APCHLPVTSL

SEQ ID NO: 13701 - protein, 9 aa, synthetic construct
APRERTGSL

SEQ ID NO: 13702 - protein, 9 aa, synthetic construct
AAVRKPIVL

SEQ ID NO: 13703 - protein, 11 aa, synthetic construct
APGPPVTTATS

SEQ ID NO: 13704 - protein, 8 aa, synthetic construct
AFGLSFYI

SEQ ID NO: 13705 - protein, 9 aa, synthetic construct
AAGGPGGLI

SEQ ID NO: 13706 - protein, 9 aa, synthetic construct
APQGLSALP

SEQ ID NO: 13707 - protein, 10 aa, synthetic construct
AGQMTPAGVI

SEQ ID NO: 13708 - protein, 9 aa, synthetic construct
ARVGPAVEL

SEQ ID NO: 13709 - protein, 9 aa, synthetic construct
LGYPAPLST

SEQ ID NO: 13710 - protein, 10 aa, synthetic construct
APIIFSTSIS

SEQ ID NO: 13711 - protein, 8 aa, synthetic construct
QKQYLQLL

SEQ ID NO: 13712 - protein, 9 aa, synthetic construct
VSNSWTQAI

SEQ ID NO: 13713 - protein, 8 aa, synthetic construct
PAHLAYRL

SEQ ID NO: 13714 - protein, 9 aa, synthetic construct
HAPVLVHPA

SEQ ID NO: 13715 - protein, 9 aa, synthetic construct
PAWNVLMWT

SEQ ID NO: 13716 - protein, 10 aa, synthetic construct
APLPELWPHL

SEQ ID NO: 13717 - protein, 10 aa, synthetic construct
YPSGLPEEYS

SEQ ID NO: 13718 - protein, 10 aa, synthetic construct
ARPPDTKATL

SEQ ID NO: 13719 - protein, 9 aa, synthetic construct
SGFKYLEYE

SEQ ID NO: 13720 - protein, 8 aa, synthetic construct
APLAKLRL

SEQ ID NO: 13721 - protein, 9 aa, synthetic construct
PLALPGPSY

SEQ ID NO: 13722 - protein, 11 aa, synthetic construct
LAASPEPWGPS

SEQ ID NO: 13723 - protein, 9 aa, synthetic construct
APLAKDKQI

SEQ ID NO: 13724 - protein, 9 aa, synthetic construct
VSELPALEY

SEQ ID NO: 13725 - protein, 12 aa, synthetic construct
YEVGPAARAPPA

SEQ ID NO: 13726 - protein, 9 aa, synthetic construct
APKALATPA

SEQ ID NO: 13727 - protein, 10 aa, synthetic construct
APKILEDIGL

SEQ ID NO: 13728 - protein, 9 aa, synthetic construct
ALAGSIHPF

SEQ ID NO: 13729 - protein, 9 aa, synthetic construct
APKVHIILF

SEQ ID NO: 13730 - protein, 10 aa, synthetic construct
APKGLNPNLL

SEQ ID NO: 13731 - protein, 9 aa, synthetic construct
APKIPSWQI

SEQ ID NO: 13732 - protein, 10 aa, synthetic construct
APGVVRGPAF

SEQ ID NO: 13733 - protein, 8 aa, synthetic construct
PYFLRKFF

SEQ ID NO: 13734 - protein, 9 aa, synthetic construct
IPANTKVML

SEQ ID NO: 13735 - protein, 9 aa, synthetic construct
LAVPEAVFS

SEQ ID NO: 13736 - protein, 9 aa, synthetic construct
EDLEPAATL

SEQ ID NO: 13737 - protein, 11 aa, synthetic construct
AVGALPGMITF

SEQ ID NO: 13738 - protein, 10 aa, synthetic construct
APPPPPKALY

SEQ ID NO: 13739 - protein, 9 aa, synthetic construct
AELLAPLTY

SEQ ID NO: 13740 - protein, 8 aa, synthetic construct
APIRLREL

SEQ ID NO: 13741 - protein, 9 aa, synthetic construct
APLPPLTMG

SEQ ID NO: 13742 - protein, 9 aa, synthetic construct
APRPQPIVL

SEQ ID NO: 13743 - protein, 11 aa, synthetic construct
ASLAAAIPVAF

SEQ ID NO: 13744 - protein, 10 aa, synthetic construct
APYLPTPERI

SEQ ID NO: 13745 - protein, 9 aa, synthetic construct
VGQPGAAVI

SEQ ID NO: 13746 - protein, 8 aa, synthetic construct
APAQAHLK

SEQ ID NO: 13747 - protein, 8 aa, synthetic construct
ARFGSLGK

SEQ ID NO: 13748 - protein, 10 aa, synthetic construct
ASGLLGPAGL

SEQ ID NO: 13749 - protein, 11 aa, synthetic construct
ALKADMNVHLL

SEQ ID NO: 13750 - protein, 9 aa, synthetic construct
ANPPVVSTV

SEQ ID NO: 13751 - protein, 10 aa, synthetic construct
APMFLLIGSL

SEQ ID NO: 13752 - protein, 10 aa, synthetic construct
ALAMLKNTSL

SEQ ID NO: 13753 - protein, 9 aa, synthetic construct
APPGYRPSA

SEQ ID NO: 13754 - protein, 10 aa, synthetic construct
APPKAGSKNL

SEQ ID NO: 13755 - protein, 10 aa, synthetic construct
AATASPSPAL

SEQ ID NO: 13756 - protein, 10 aa, synthetic construct
ASDPLAGAAL

SEQ ID NO: 13757 - protein, 9 aa, synthetic construct
PALDGSAAL

SEQ ID NO: 13758 - protein, 8 aa, synthetic construct
QPGQLAEF

SEQ ID NO: 13759 - protein, 10 aa, synthetic construct
APQIPPPNNA

SEQ ID NO: 13760 - protein, 9 aa, synthetic construct
APSQLPSRY

SEQ ID NO: 13761 - protein, 9 aa, synthetic construct
VYILAVMAF

SEQ ID NO: 13762 - protein, 9 aa, synthetic construct
PARAVSVRL

SEQ ID NO: 13763 - protein, 8 aa, synthetic construct
ALRNPDRL

SEQ ID NO: 13764 - protein, 9 aa, synthetic construct
PARVRDGIA

SEQ ID NO: 13765 - protein, 9 aa, synthetic construct
AFAFLDLPR

SEQ ID NO: 13766 - protein, 7 aa, synthetic construct
ALFMKQI

SEQ ID NO: 13767 - protein, 7 aa, synthetic construct
ALERHQL

SEQ ID NO: 13768 - protein, 10 aa, synthetic construct
AGGAARPGPL

SEQ ID NO: 13769 - protein, 8 aa, synthetic construct
QPRIWALF

SEQ ID NO: 13770 - protein, 9 aa, synthetic construct
LLRAAPLLL

SEQ ID NO: 13771 - protein, 11 aa, synthetic construct
ALAAGRLPDVL

SEQ ID NO: 13772 - protein, 9 aa, synthetic construct
APRPAAGAI

SEQ ID NO: 13773 - protein, 11 aa, synthetic construct
APPGRAPAPGL

SEQ ID NO: 13774 - protein, 8 aa, synthetic construct
APRPTGAL

SEQ ID NO: 13775 - protein, 10 aa, synthetic construct
IWDINAMLAM

SEQ ID NO: 13776 - protein, 11 aa, synthetic construct
AQERAALPTVL

SEQ ID NO: 13777 - protein, 11 aa, synthetic construct
AVVSLFYGTVI

SEQ ID NO: 13778 - protein, 10 aa, synthetic construct
QPEQSRLEAL

SEQ ID NO: 13779 - protein, 11 aa, synthetic construct
ESQATTPRPAL

SEQ ID NO: 13780 - protein, 9 aa, synthetic construct
APPRTTLGL

SEQ ID NO: 13781 - protein, 12 aa, synthetic construct
PMLLGVAAASQL

SEQ ID NO: 13782 - protein, 9 aa, synthetic construct
DRRDLAIGL

SEQ ID NO: 13783 - protein, 7 aa, synthetic construct
LEHREIA

SEQ ID NO: 13784 - protein, 8 aa, synthetic construct
QRHSPLGF

SEQ ID NO: 13785 - protein, 13 aa, synthetic construct
ANFAANFGAIGFF

SEQ ID NO: 13786 - protein, 10 aa, synthetic construct
TVLFGVSRAL

SEQ ID NO: 13787 - protein, 9 aa, synthetic construct
IQTLCKSAL

SEQ ID NO: 13788 - protein, 9 aa, synthetic construct
WPRKTQVSL

SEQ ID NO: 13789 - protein, 9 aa, synthetic construct
LAMTYKQRA

SEQ ID NO: 13790 - protein, 11 aa, synthetic construct
SKKPGGSAVLA

SEQ ID NO: 13791 - protein, 10 aa, synthetic construct
APFPALGKTI

SEQ ID NO: 13792 - protein, 9 aa, synthetic construct
NKLPNTKSL

SEQ ID NO: 13793 - protein, 14 aa, synthetic construct
PARGVTGAGGWGSA

SEQ ID NO: 13794 - protein, 9 aa, synthetic construct
LRPAPLTLG

SEQ ID NO: 13795 - protein, 10 aa, synthetic construct
VPRVPVGMLF

SEQ ID NO: 13796 - protein, 11 aa, synthetic construct
AEVSQPRLAEL

SEQ ID NO: 13797 - protein, 11 aa, synthetic construct
APRAPSVPARP

SEQ ID NO: 13798 - protein, 10 aa, synthetic construct
RLLYMKEKPL

SEQ ID NO: 13799 - protein, 12 aa, synthetic construct
QRALHSILNAAI

SEQ ID NO: 13800 - protein, 9 aa, synthetic construct
APGPRLLSL

SEQ ID NO: 13801 - protein, 11 aa, synthetic construct
APPRLAPGGRL

SEQ ID NO: 13802 - protein, 9 aa, synthetic construct
APRPPPSER

SEQ ID NO: 13803 - protein, 10 aa, synthetic construct
AHRMHILLGL

SEQ ID NO: 13804 - protein, 9 aa, synthetic construct
APPRPTRRF

SEQ ID NO: 13805 - protein, 12 aa, synthetic construct
LPGPGPTPRTPA

SEQ ID NO: 13806 - protein, 11 aa, synthetic construct
AARSAAGASSL

SEQ ID NO: 13807 - protein, 8 aa, synthetic construct
LMKFIAMA

SEQ ID NO: 13808 - protein, 10 aa, synthetic construct
RPGAAPLGMA

SEQ ID NO: 13809 - protein, 12 aa, synthetic construct
QLTLSGLNGAQM

SEQ ID NO: 13810 - protein, 9 aa, synthetic construct
SLRPQVSSI

SEQ ID NO: 13811 - protein, 9 aa, synthetic construct
LFRASPATL

SEQ ID NO: 13812 - protein, 10 aa, synthetic construct
LAPGSRRHPA

SEQ ID NO: 13813 - protein, 11 aa, synthetic construct
LPRSLAILSLA

SEQ ID NO: 13814 - protein, 10 aa, synthetic construct
AGKRPLDTTL

SEQ ID NO: 13815 - protein, 10 aa, synthetic construct
GGLAARLQLW

SEQ ID NO: 13816 - protein, 10 aa, synthetic construct
VRPAAVPGAL

SEQ ID NO: 13817 - protein, 10 aa, synthetic construct
GRVPGLPAAL

SEQ ID NO: 13818 - protein, 10 aa, synthetic construct
AHVMARPLRA

SEQ ID NO: 13819 - protein, 12 aa, synthetic construct
ISTYGFRGEALA

SEQ ID NO: 13820 - protein, 11 aa, synthetic construct
APLGKLTVAQI

SEQ ID NO: 13821 - protein, 9 aa, synthetic construct
LKKIGSIPA

SEQ ID NO: 13822 - protein, 10 aa, synthetic construct
QGWRARVQTF

SEQ ID NO: 13823 - protein, 10 aa, synthetic construct
APSPPPFFFS

SEQ ID NO: 13824 - protein, 8 aa, synthetic construct
AQLEELFM

SEQ ID NO: 13825 - protein, 9 aa, synthetic construct
VSVTEMAVL

SEQ ID NO: 13826 - protein, 11 aa, synthetic construct
APKTAMCAHLL

SEQ ID NO: 13827 - protein, 12 aa, synthetic construct
APCVPNGSALLL

SEQ ID NO: 13828 - protein, 12 aa, synthetic construct
AGLDGRVVGAVL

SEQ ID NO: 13829 - protein, 11 aa, synthetic construct
ASPLHWAKNAE

SEQ ID NO: 13830 - protein, 9 aa, synthetic construct
APSIPTSPF

SEQ ID NO: 13831 - protein, 10 aa, synthetic construct
AVGQIWPQTL

SEQ ID NO: 13832 - protein, 10 aa, synthetic construct
APLSLNSFLQ

SEQ ID NO: 13833 - protein, 9 aa, synthetic construct
APNAVKTAF

SEQ ID NO: 13834 - protein, 11 aa, synthetic construct
APGLPPAPSAL

SEQ ID NO: 13835 - protein, 12 aa, synthetic construct
APSPSIGGSSRL

SEQ ID NO: 13836 - protein, 9 aa, synthetic construct
PASPLPGSL

SEQ ID NO: 13837 - protein, 9 aa, synthetic construct
APSPLPRSL

SEQ ID NO: 13838 - protein, 9 aa, synthetic construct
APSALTPKI

SEQ ID NO: 13839 - protein, 10 aa, synthetic construct
VARQLQPSVV

SEQ ID NO: 13840 - protein, 11 aa, synthetic construct
PVVRNGSVAVV

SEQ ID NO: 13841 - protein, 10 aa, synthetic construct
LSMTGEVPAL

SEQ ID NO: 13842 - protein, 10 aa, synthetic construct
SAERLALAPA

SEQ ID NO: 13843 - protein, 10 aa, synthetic construct
APSVPPIPSV

SEQ ID NO: 13844 - protein, 10 aa, synthetic construct
APSVPPPTLA

SEQ ID NO: 13845 - protein, 9 aa, synthetic construct
AEQMPASSF

SEQ ID NO: 13846 - protein, 9 aa, synthetic construct
LAPTDVLEA

SEQ ID NO: 13847 - protein, 9 aa, synthetic construct
TPYEGCVFL

SEQ ID NO: 13848 - protein, 9 aa, synthetic construct
LGTPVVGTL

SEQ ID NO: 13849 - protein, 8 aa, synthetic construct
PVALQPAF

SEQ ID NO: 13850 - protein, 8 aa, synthetic construct
APVPQTIM

SEQ ID NO: 13851 - protein, 9 aa, synthetic construct
TLAVGPPMA

SEQ ID NO: 13852 - protein, 9 aa, synthetic construct
VPADALDQK

SEQ ID NO: 13853 - protein, 10 aa, synthetic construct
FVAGHDSLPA

SEQ ID NO: 13854 - protein, 9 aa, synthetic construct
ALYPAFWVF

SEQ ID NO: 13855 - protein, 10 aa, synthetic construct
LVHAGVPASY

SEQ ID NO: 13856 - protein, 9 aa, synthetic construct
TKVSRMWSF

SEQ ID NO: 13857 - protein, 9 aa, synthetic construct
LVSAVPLLL

SEQ ID NO: 13858 - protein, 9 aa, synthetic construct
AAVPKLVLF

SEQ ID NO: 13859 - protein, 9 aa, synthetic construct
PVAGPKLYP

SEQ ID NO: 13860 - protein, 10 aa, synthetic construct
AQASRVAGIY

SEQ ID NO: 13861 - protein, 9 aa, synthetic construct
TPGMVMSIY

SEQ ID NO: 13862 - protein, 9 aa, synthetic construct
PGLPASLDY

SEQ ID NO: 13863 - protein, 10 aa, synthetic construct
VAPLGEVTLL

SEQ ID NO: 13864 - protein, 11 aa, synthetic construct
PGIQTMTVPSA

SEQ ID NO: 13865 - protein, 9 aa, synthetic construct
VLMSFLVAL

SEQ ID NO: 13866 - protein, 9 aa, synthetic construct
KASVQFVDY

SEQ ID NO: 13867 - protein, 9 aa, synthetic construct
VAMLIAGLI

SEQ ID NO: 13868 - protein, 9 aa, synthetic construct
APVLYAGLL

SEQ ID NO: 13869 - protein, 9 aa, synthetic construct
AAIPGYMVL

SEQ ID NO: 13870 - protein, 9 aa, synthetic construct
IVAMSFVPA

SEQ ID NO: 13871 - protein, 9 aa, synthetic construct
LSMVMAIAV

SEQ ID NO: 13872 - protein, 10 aa, synthetic construct
SAHSHPIPAF

SEQ ID NO: 13873 - protein, 13 aa, synthetic construct
QPSGGQAVEGEML

SEQ ID NO: 13874 - protein, 11 aa, synthetic construct
YKMTTDPMLAY

SEQ ID NO: 13875 - protein, 10 aa, synthetic construct
APLCLLLLVA

SEQ ID NO: 13876 - protein, 13 aa, synthetic construct
ARASGGAAGPAPA

SEQ ID NO: 13877 - protein, 10 aa, synthetic construct
VSTHKGAELP

SEQ ID NO: 13878 - protein, 12 aa, synthetic construct
APPGSKEAEVQA

SEQ ID NO: 13879 - protein, 11 aa, synthetic construct
APWRPSSAPSQ

SEQ ID NO: 13880 - protein, 16 aa, synthetic construct
ADPAAGGAAGGGAAQY

SEQ ID NO: 13881 - protein, 10 aa, synthetic construct
FVNITYAEPA

SEQ ID NO: 13882 - protein, 9 aa, synthetic construct
SFDNPEWFY

SEQ ID NO: 13883 - protein, 11 aa, synthetic construct
LVTNMVPMYPA

SEQ ID NO: 13884 - protein, 8 aa, synthetic construct
ATWSLPAL

SEQ ID NO: 13885 - protein, 8 aa, synthetic construct
AYPRAVTL

SEQ ID NO: 13886 - protein, 9 aa, synthetic construct
FAMKEFIAT

SEQ ID NO: 13887 - protein, 10 aa, synthetic construct
AAKQLTKGAF

SEQ ID NO: 13888 - protein, 10 aa, synthetic construct
AMPPDPSSCL

SEQ ID NO: 13889 - protein, 11 aa, synthetic construct
AQAIFPSMARA

SEQ ID NO: 13890 - protein, 9 aa, synthetic construct
AQADFAKVL

SEQ ID NO: 13891 - protein, 10 aa, synthetic construct
NAEPDPPVRL

SEQ ID NO: 13892 - protein, 10 aa, synthetic construct
QAFNGLTSLR

SEQ ID NO: 13893 - protein, 7 aa, synthetic construct
SLLMLFY

SEQ ID NO: 13894 - protein, 9 aa, synthetic construct
AQDGRQQYL

SEQ ID NO: 13895 - protein, 11 aa, synthetic construct
PSGLCGAALLV

SEQ ID NO: 13896 - protein, 11 aa, synthetic construct
AQPPHLRKNTL

SEQ ID NO: 13897 - protein, 8 aa, synthetic construct
MQKKSLLL

SEQ ID NO: 13898 - protein, 11 aa, synthetic construct
FQLGLGGKAQA

SEQ ID NO: 13899 - protein, 8 aa, synthetic construct
VQAFLSLL

SEQ ID NO: 13900 - protein, 9 aa, synthetic construct
LQAHVDKMP

SEQ ID NO: 13901 - protein, 11 aa, synthetic construct
VLGPAMVGVAV

SEQ ID NO: 13902 - protein, 9 aa, synthetic construct
AVFNQTVTV

SEQ ID NO: 13903 - protein, 8 aa, synthetic construct
AQIVQNHL

SEQ ID NO: 13904 - protein, 8 aa, synthetic construct
QLARTLAL

SEQ ID NO: 13905 - protein, 8 aa, synthetic construct
ISQALSWV

SEQ ID NO: 13906 - protein, 9 aa, synthetic construct
WAQSLVSLF

SEQ ID NO: 13907 - protein, 10 aa, synthetic construct
AAGIAIMTSL

SEQ ID NO: 13908 - protein, 10 aa, synthetic construct
AQKDSNSKPA

SEQ ID NO: 13909 - protein, 10 aa, synthetic construct
AKQAEAIMSP

SEQ ID NO: 13910 - protein, 8 aa, synthetic construct
QAKLELRV

SEQ ID NO: 13911 - protein, 8 aa, synthetic construct
RLISVPYV

SEQ ID NO: 13912 - protein, 8 aa, synthetic construct
FARRKKVA

SEQ ID NO: 13913 - protein, 9 aa, synthetic construct
ALKAGKLKF

SEQ ID NO: 13914 - protein, 7 aa, synthetic construct
LQIQAFL

SEQ ID NO: 13915 - protein, 11 aa, synthetic construct
AAGLSPMVPQL

SEQ ID NO: 13916 - protein, 8 aa, synthetic construct
AIQILKIA

SEQ ID NO: 13917 - protein, 8 aa, synthetic construct
QALIQGLI

SEQ ID NO: 13918 - protein, 10 aa, synthetic construct
AAVALGAKVL

SEQ ID NO: 13919 - protein, 9 aa, synthetic construct
LAIQVLDPN

SEQ ID NO: 13920 - protein, 10 aa, synthetic construct
PLAAGDPLPT

SEQ ID NO: 13921 - protein, 8 aa, synthetic construct
LAQQQAVI

SEQ ID NO: 13922 - protein, 9 aa, synthetic construct
GAALPTLML

SEQ ID NO: 13923 - protein, 10 aa, synthetic construct
MEPRKKLRVD

SEQ ID NO: 13924 - protein, 11 aa, synthetic construct
QLRAKLLDLSD

SEQ ID NO: 13925 - protein, 8 aa, synthetic construct
AQRSLVEL

SEQ ID NO: 13926 - protein, 8 aa, synthetic construct
SPKSLMLL

SEQ ID NO: 13927 - protein, 9 aa, synthetic construct
GQAPGSLFV

SEQ ID NO: 13928 - protein, 8 aa, synthetic construct
AQNKVCRK

SEQ ID NO: 13929 - protein, 14 aa, synthetic construct
AGAAAAAASPGSPG

SEQ ID NO: 13930 - protein, 10 aa, synthetic construct
AQSDLNLTHG

SEQ ID NO: 13931 - protein, 10 aa, synthetic construct
LEKQQEVHSA

SEQ ID NO: 13932 - protein, 11 aa, synthetic construct
AAGVNQLFFTT

SEQ ID NO: 13933 - protein, 8 aa, synthetic construct
LDQAQLTP

SEQ ID NO: 13934 - protein, 9 aa, synthetic construct
ALRKAGRFL

SEQ ID NO: 13935 - protein, 9 aa, synthetic construct
VRVMNGAIL

SEQ ID NO: 13936 - protein, 9 aa, synthetic construct
YAQDSIELL

SEQ ID NO: 13937 - protein, 8 aa, synthetic construct
FSVNISEL

SEQ ID NO: 13938 - protein, 8 aa, synthetic construct
QATAPLVL

SEQ ID NO: 13939 - protein, 8 aa, synthetic construct
VALNTLCV

SEQ ID NO: 13940 - protein, 10 aa, synthetic construct
GAGLQLVDAV

SEQ ID NO: 13941 - protein, 11 aa, synthetic construct
GAAVMDAALLL

SEQ ID NO: 13942 - protein, 9 aa, synthetic construct
LENTNMVTY

SEQ ID NO: 13943 - protein, 10 aa, synthetic construct
AAGYERGCRL

SEQ ID NO: 13944 - protein, 9 aa, synthetic construct
FLEALEFYY

SEQ ID NO: 13945 - protein, 10 aa, synthetic construct
AQYERAIQES

SEQ ID NO: 13946 - protein, 10 aa, synthetic construct
AQKVFEEMNV

SEQ ID NO: 13947 - protein, 9 aa, synthetic construct
DFEQSHLEV

SEQ ID NO: 13948 - protein, 8 aa, synthetic construct
AQYFLEVK

SEQ ID NO: 13949 - protein, 9 aa, synthetic construct
MSHKLYFSL

SEQ ID NO: 13950 - protein, 8 aa, synthetic construct
IAQYKFVY

SEQ ID NO: 13951 - protein, 10 aa, synthetic construct
FPPPAAGLYV

SEQ ID NO: 13952 - protein, 9 aa, synthetic construct
AQLYTLQPK

SEQ ID NO: 13953 - protein, 10 aa, synthetic construct
AQALAQYLLV

SEQ ID NO: 13954 - protein, 9 aa, synthetic construct
QSFLISQNV

SEQ ID NO: 13955 - protein, 9 aa, synthetic construct
FAYGANILV

SEQ ID NO: 13956 - protein, 10 aa, synthetic construct
DLSHNGLLVV

SEQ ID NO: 13957 - protein, 9 aa, synthetic construct
GFASPLTGI

SEQ ID NO: 13958 - protein, 8 aa, synthetic construct
QEHLFTGL

SEQ ID NO: 13959 - protein, 10 aa, synthetic construct
VMASTLKTEI

SEQ ID NO: 13960 - protein, 9 aa, synthetic construct
QAMLLVVAV

SEQ ID NO: 13961 - protein, 8 aa, synthetic construct
CLPLFMKM

SEQ ID NO: 13962 - protein, 9 aa, synthetic construct
QQLTAMKVI

SEQ ID NO: 13963 - protein, 10 aa, synthetic construct
GWPTTLLVVM

SEQ ID NO: 13964 - protein, 10 aa, synthetic construct
AGKCRPSLSL

SEQ ID NO: 13965 - protein, 9 aa, synthetic construct
LSPSWVLMR

SEQ ID NO: 13966 - protein, 9 aa, synthetic construct
FARAFPMPG

SEQ ID NO: 13967 - protein, 9 aa, synthetic construct
LARAKFIPL

SEQ ID NO: 13968 - protein, 9 aa, synthetic construct
LARALLLPL

SEQ ID NO: 13969 - protein, 10 aa, synthetic construct
ARARVALTGL

SEQ ID NO: 13970 - protein, 11 aa, synthetic construct
NEEVKNAMRKL

SEQ ID NO: 13971 - protein, 9 aa, synthetic construct
RIGELHPSL

SEQ ID NO: 13972 - protein, 8 aa, synthetic construct
ARHQHLRL

SEQ ID NO: 13973 - protein, 11 aa, synthetic construct
MVSRAMIDSRT

SEQ ID NO: 13974 - protein, 10 aa, synthetic construct
SNGKEFNNWF

SEQ ID NO: 13975 - protein, 10 aa, synthetic construct
LMTQLLMKWF

SEQ ID NO: 13976 - protein, 9 aa, synthetic construct
DIMKTIRNI

SEQ ID NO: 13977 - protein, 9 aa, synthetic construct
FIMLRTFPT

SEQ ID NO: 13978 - protein, 10 aa, synthetic construct
TYVTILIGDF

SEQ ID NO: 13979 - protein, 8 aa, synthetic construct
LFQRLQSM

SEQ ID NO: 13980 - protein, 11 aa, synthetic construct
AGGRASRDILK

SEQ ID NO: 13981 - protein, 10 aa, synthetic construct
APRNLPSTGF

SEQ ID NO: 13982 - protein, 9 aa, synthetic construct
RATFFLTGF

SEQ ID NO: 13983 - protein, 9 aa, synthetic construct
LFRAHEIAS

SEQ ID NO: 13984 - protein, 10 aa, synthetic construct
SNVMVKKQVF

SEQ ID NO: 13985 - protein, 13 aa, synthetic construct
RLGHGLIISCPGA

SEQ ID NO: 13986 - protein, 9 aa, synthetic construct
PVMLKIGTC

SEQ ID NO: 13987 - protein, 8 aa, synthetic construct
NDKKMILV

SEQ ID NO: 13988 - protein, 8 aa, synthetic construct
FQNSRLIV

SEQ ID NO: 13989 - protein, 9 aa, synthetic construct
LFRASGNLV

SEQ ID NO: 13990 - protein, 9 aa, synthetic construct
TECKRSPYL

SEQ ID NO: 13991 - protein, 9 aa, synthetic construct
EYLTQSHYI

SEQ ID NO: 13992 - protein, 10 aa, synthetic construct
QTRASWEYLV

SEQ ID NO: 13993 - protein, 9 aa, synthetic construct
LSVKMARLS

SEQ ID NO: 13994 - protein, 10 aa, synthetic construct
SLDKAMSIPM

SEQ ID NO: 13995 - protein, 9 aa, synthetic construct
RAFSQPGTI

SEQ ID NO: 13996 - protein, 10 aa, synthetic construct
GKTVAMPIKV

SEQ ID NO: 13997 - protein, 12 aa, synthetic construct
SAGHGLPAKFVI

SEQ ID NO: 13998 - protein, 9 aa, synthetic construct
TVCKLSVSK

SEQ ID NO: 13999 - protein, 9 aa, synthetic construct
DIHSRVQKL

SEQ ID NO: 14000 - protein, 10 aa, synthetic construct
FGPHLVPILV

SEQ ID NO: 14001 - protein, 10 aa, synthetic construct
YPKSVVMVST

SEQ ID NO: 14002 - protein, 10 aa, synthetic construct
ASYLKMLPMG

SEQ ID NO: 14003 - protein, 10 aa, synthetic construct
GYGIGTLFGY

SEQ ID NO: 14004 - protein, 9 aa, synthetic construct
FEGHPTRGY

SEQ ID NO: 14005 - protein, 10 aa, synthetic construct
LAAERGHVEM

SEQ ID NO: 14006 - protein, 10 aa, synthetic construct
GWAGRETFSL

SEQ ID NO: 14007 - protein, 11 aa, synthetic construct
ANKGAKESGLY

SEQ ID NO: 14008 - protein, 9 aa, synthetic construct
EKGRIHVVY

SEQ ID NO: 14009 - protein, 9 aa, synthetic construct
RVVGKLVAR

SEQ ID NO: 14010 - protein, 10 aa, synthetic construct
KGQGVLIGNW

SEQ ID NO: 14011 - protein, 9 aa, synthetic construct
KMFARQLNF

SEQ ID NO: 14012 - protein, 9 aa, synthetic construct
RLKALNATF

SEQ ID NO: 14013 - protein, 10 aa, synthetic construct
LQGSRVLYHF

SEQ ID NO: 14014 - protein, 10 aa, synthetic construct
ARLKFGFSFF

SEQ ID NO: 14015 - protein, 13 aa, synthetic construct
YKCGLSALPAGVF

SEQ ID NO: 14016 - protein, 9 aa, synthetic construct
NVVLRDYIY

SEQ ID NO: 14017 - protein, 9 aa, synthetic construct
LFIRALPSF

SEQ ID NO: 14018 - protein, 10 aa, synthetic construct
RALEGLVQIY

SEQ ID NO: 14019 - protein, 9 aa, synthetic construct
EAIKPKEIL

SEQ ID NO: 14020 - protein, 10 aa, synthetic construct
KLGDLDAMIF

SEQ ID NO: 14021 - protein, 9 aa, synthetic construct
RSVQVLRAI

SEQ ID NO: 14022 - protein, 11 aa, synthetic construct
GFTTRPSAGTF

SEQ ID NO: 14023 - protein, 9 aa, synthetic construct
AALRALVQR

SEQ ID NO: 14024 - protein, 9 aa, synthetic construct
KLRQAERLF

SEQ ID NO: 14025 - protein, 10 aa, synthetic construct
TAYKVRVGAV

SEQ ID NO: 14026 - protein, 11 aa, synthetic construct
TPAGRILVPSH

SEQ ID NO: 14027 - protein, 9 aa, synthetic construct
MINKQKGGL

SEQ ID NO: 14028 - protein, 8 aa, synthetic construct
MNKQIKNL

SEQ ID NO: 14029 - protein, 9 aa, synthetic construct
RGEILKERV

SEQ ID NO: 14030 - protein, 9 aa, synthetic construct
KETPKNRKV

SEQ ID NO: 14031 - protein, 9 aa, synthetic construct
VEARLRDKL

SEQ ID NO: 14032 - protein, 10 aa, synthetic construct
NLIQAYKGLL

SEQ ID NO: 14033 - protein, 10 aa, synthetic construct
IVEMPLAHKL

SEQ ID NO: 14034 - protein, 12 aa, synthetic construct
SKQNQANLEQRK

SEQ ID NO: 14035 - protein, 9 aa, synthetic construct
LVTQRALAF

SEQ ID NO: 14036 - protein, 9 aa, synthetic construct
RLAFRAAVK

SEQ ID NO: 14037 - protein, 9 aa, synthetic construct
VERLIHEFT

SEQ ID NO: 14038 - protein, 9 aa, synthetic construct
ELEVRLHTF

SEQ ID NO: 14039 - protein, 8 aa, synthetic construct
LRNLLSKV

SEQ ID NO: 14040 - protein, 9 aa, synthetic construct
ARHIRTVTL

SEQ ID NO: 14041 - protein, 8 aa, synthetic construct
ARLHPGLR

SEQ ID NO: 14042 - protein, 9 aa, synthetic construct
LGELKRLEY

SEQ ID NO: 14043 - protein, 10 aa, synthetic construct
RALIGKTSIL

SEQ ID NO: 14044 - protein, 9 aa, synthetic construct
DKLSQRGQL

SEQ ID NO: 14045 - protein, 9 aa, synthetic construct
PMLWLLLHF

SEQ ID NO: 14046 - protein, 10 aa, synthetic construct
QKPLPVSLHV

SEQ ID NO: 14047 - protein, 9 aa, synthetic construct
RALLRKTQI

SEQ ID NO: 14048 - protein, 9 aa, synthetic construct
ISPARLNLK

SEQ ID NO: 14049 - protein, 10 aa, synthetic construct
AWRALPGAGL

SEQ ID NO: 14050 - protein, 9 aa, synthetic construct
LARVQLLGH

SEQ ID NO: 14051 - protein, 9 aa, synthetic construct
YTNRVLKDY

SEQ ID NO: 14052 - protein, 8 aa, synthetic construct
ARTLQKMI

SEQ ID NO: 14053 - protein, 8 aa, synthetic construct
IQRLTYKL

SEQ ID NO: 14054 - protein, 9 aa, synthetic construct
RALSRLLPG

SEQ ID NO: 14055 - protein, 9 aa, synthetic construct
RLAISRGPL

SEQ ID NO: 14056 - protein, 11 aa, synthetic construct
LSRLATLLGDY

SEQ ID NO: 14057 - protein, 12 aa, synthetic construct
SLPAAAQPGVRL

SEQ ID NO: 14058 - protein, 8 aa, synthetic construct
RRLMMVAF

SEQ ID NO: 14059 - protein, 10 aa, synthetic construct
LARLTPIPFG

SEQ ID NO: 14060 - protein, 10 aa, synthetic construct
QPKIKGPFVA

SEQ ID NO: 14061 - protein, 9 aa, synthetic construct
ALRTLPTAK

SEQ ID NO: 14062 - protein, 9 aa, synthetic construct
SQKPKLAKA

SEQ ID NO: 14063 - protein, 9 aa, synthetic construct
IARVLKLLK

SEQ ID NO: 14064 - protein, 11 aa, synthetic construct
FDVTDGINALI

SEQ ID NO: 14065 - protein, 9 aa, synthetic construct
LRPIEGNVR

SEQ ID NO: 14066 - protein, 9 aa, synthetic construct
ARLNFPSVQ

SEQ ID NO: 14067 - protein, 9 aa, synthetic construct
VMPTLLIFH

SEQ ID NO: 14068 - protein, 10 aa, synthetic construct
ASAPRGDLMF

SEQ ID NO: 14069 - protein, 9 aa, synthetic construct
NINIPMGAF

SEQ ID NO: 14070 - protein, 11 aa, synthetic construct
QRTRPSSLPLF

SEQ ID NO: 14071 - protein, 11 aa, synthetic construct
AGVLSGRMGSF

SEQ ID NO: 14072 - protein, 8 aa, synthetic construct
ARPSLPLL

SEQ ID NO: 14073 - protein, 11 aa, synthetic construct
GGFMTTAFQYI

SEQ ID NO: 14074 - protein, 9 aa, synthetic construct
ARSLATRLV

SEQ ID NO: 14075 - protein, 10 aa, synthetic construct
QGLMKLPFTI

SEQ ID NO: 14076 - protein, 8 aa, synthetic construct
WKIPPPKL

SEQ ID NO: 14077 - protein, 9 aa, synthetic construct
SKRPSKIGF

SEQ ID NO: 14078 - protein, 9 aa, synthetic construct
QGLFLPLAL

SEQ ID NO: 14079 - protein, 9 aa, synthetic construct
LKHPQAEEI

SEQ ID NO: 14080 - protein, 9 aa, synthetic construct
CKKKAAALF

SEQ ID NO: 14081 - protein, 8 aa, synthetic construct
QLFFFHLF

SEQ ID NO: 14082 - protein, 10 aa, synthetic construct
RAQTILHSCL

SEQ ID NO: 14083 - protein, 9 aa, synthetic construct
GFNFLLAAF

SEQ ID NO: 14084 - protein, 10 aa, synthetic construct
GGRRGKRPKL

SEQ ID NO: 14085 - protein, 11 aa, synthetic construct
PPPTLPTSGTL

SEQ ID NO: 14086 - protein, 9 aa, synthetic construct
NVKNVAKTF

SEQ ID NO: 14087 - protein, 9 aa, synthetic construct
KRSKSQNIL

SEQ ID NO: 14088 - protein, 10 aa, synthetic construct
VAGVLHLGNI

SEQ ID NO: 14089 - protein, 9 aa, synthetic construct
IMNKFKVLM

SEQ ID NO: 14090 - protein, 9 aa, synthetic construct
EIRSSKKYT

SEQ ID NO: 14091 - protein, 9 aa, synthetic construct
KQDVLLLYY

SEQ ID NO: 14092 - protein, 9 aa, synthetic construct
TVLKRAVEL

SEQ ID NO: 14093 - protein, 10 aa, synthetic construct
GLTTVEIVTM

SEQ ID NO: 14094 - protein, 9 aa, synthetic construct
EISKKLNTM

SEQ ID NO: 14095 - protein, 9 aa, synthetic construct
NLKKPTMTM

SEQ ID NO: 14096 - protein, 10 aa, synthetic construct
AKNLQLAVAR

SEQ ID NO: 14097 - protein, 10 aa, synthetic construct
FARVSLFQNC

SEQ ID NO: 14098 - protein, 10 aa, synthetic construct
SRLGLEKRVL

SEQ ID NO: 14099 - protein, 9 aa, synthetic construct
RPGVLVPLL

SEQ ID NO: 14100 - protein, 9 aa, synthetic construct
AERRLSRFM

SEQ ID NO: 14101 - protein, 8 aa, synthetic construct
YFLHWWYD

SEQ ID NO: 14102 - protein, 13 aa, synthetic construct
SPGAAGGSLLLMG

SEQ ID NO: 14103 - protein, 10 aa, synthetic construct
RKNQLPGLLG

SEQ ID NO: 14104 - protein, 10 aa, synthetic construct
NNSERSMALL

SEQ ID NO: 14105 - protein, 10 aa, synthetic construct
VAQMPVVIGF

SEQ ID NO: 14106 - protein, 12 aa, synthetic construct
NGVQDPQHERII

SEQ ID NO: 14107 - protein, 9 aa, synthetic construct
LVNPHRVHF

SEQ ID NO: 14108 - protein, 12 aa, synthetic construct
RGAGGGKGVQQL

SEQ ID NO: 14109 - protein, 9 aa, synthetic construct
RKFGVEEGF

SEQ ID NO: 14110 - protein, 10 aa, synthetic construct
LPPVRPVCNL

SEQ ID NO: 14111 - protein, 10 aa, synthetic construct
DNLYFVMDYI

SEQ ID NO: 14112 - protein, 8 aa, synthetic construct
KCFLDHLF

SEQ ID NO: 14113 - protein, 10 aa, synthetic construct
AVEAVHLPHF

SEQ ID NO: 14114 - protein, 11 aa, synthetic construct
IDTPANDPSFF

SEQ ID NO: 14115 - protein, 11 aa, synthetic construct
LKPGTMSPEAF

SEQ ID NO: 14116 - protein, 8 aa, synthetic construct
LNMDKRLY

SEQ ID NO: 14117 - protein, 9 aa, synthetic construct
DPGTAFPIN

SEQ ID NO: 14118 - protein, 8 aa, synthetic construct
TQEPFLNP

SEQ ID NO: 14119 - protein, 7 aa, synthetic construct
MFHLPYQ

SEQ ID NO: 14120 - protein, 10 aa, synthetic construct
SGEEADAGSL

SEQ ID NO: 14121 - protein, 9 aa, synthetic construct
LGEMIQAYE

SEQ ID NO: 14122 - protein, 9 aa, synthetic construct
LNDRASVLY

SEQ ID NO: 14123 - protein, 9 aa, synthetic construct
FSGELSVLY

SEQ ID NO: 14124 - protein, 9 aa, synthetic construct
YASDYFDQL

SEQ ID NO: 14125 - protein, 8 aa, synthetic construct
EKEQMLEY

SEQ ID NO: 14126 - protein, 8 aa, synthetic construct
LVSQCNLY

SEQ ID NO: 14127 - protein, 10 aa, synthetic construct
DTAFGHPQAY

SEQ ID NO: 14128 - protein, 10 aa, synthetic construct
GETFTCVVGH

SEQ ID NO: 14129 - protein, 8 aa, synthetic construct
INVSEYTY

SEQ ID NO: 14130 - protein, 11 aa, synthetic construct
SAEYSSISIMG

SEQ ID NO: 14131 - protein, 11 aa, synthetic construct
ASLAASTTMYV

SEQ ID NO: 14132 - protein, 9 aa, synthetic construct
GTHTSLRLP

SEQ ID NO: 14133 - protein, 8 aa, synthetic construct
AVTDIPLG

SEQ ID NO: 14134 - protein, 9 aa, synthetic construct
ASLSAFRPA

SEQ ID NO: 14135 - protein, 9 aa, synthetic construct
SALSQLMVS

SEQ ID NO: 14136 - protein, 14 aa, synthetic construct
ASIGVVGVKMSAVD

SEQ ID NO: 14137 - protein, 9 aa, synthetic construct
ASLFLTRGL

SEQ ID NO: 14138 - protein, 9 aa, synthetic construct
ASLLDCDIV

SEQ ID NO: 14139 - protein, 11 aa, synthetic construct
EIHVAIVSIRP

SEQ ID NO: 14140 - protein, 9 aa, synthetic construct
ATPDSLSLS

SEQ ID NO: 14141 - protein, 9 aa, synthetic construct
ASLRQLAVL

SEQ ID NO: 14142 - protein, 10 aa, synthetic construct
VGNAKATVSA

SEQ ID NO: 14143 - protein, 9 aa, synthetic construct
IPRVILSAS

SEQ ID NO: 14144 - protein, 7 aa, synthetic construct
ASRLYRL

SEQ ID NO: 14145 - protein, 9 aa, synthetic construct
GTVPLHLAA

SEQ ID NO: 14146 - protein, 8 aa, synthetic construct
RLHVVPSA

SEQ ID NO: 14147 - protein, 9 aa, synthetic construct
QQTLWRPEG

SEQ ID NO: 14148 - protein, 8 aa, synthetic construct
NLVEITVF

SEQ ID NO: 14149 - protein, 11 aa, synthetic construct
SDVSMPILGPS

SEQ ID NO: 14150 - protein, 10 aa, synthetic construct
TVGFLERSSA

SEQ ID NO: 14151 - protein, 11 aa, synthetic construct
ASVGGFYRTAS

SEQ ID NO: 14152 - protein, 11 aa, synthetic construct
ASVNPQDLQGS

SEQ ID NO: 14153 - protein, 11 aa, synthetic construct
ASVPVDVMPGQ

SEQ ID NO: 14154 - protein, 9 aa, synthetic construct
TSYQSLTEL

SEQ ID NO: 14155 - protein, 8 aa, synthetic construct
TSAYSSLL

SEQ ID NO: 14156 - protein, 9 aa, synthetic construct
QVSSFVPLT

SEQ ID NO: 14157 - protein, 11 aa, synthetic construct
TAAAKGQGVLS

SEQ ID NO: 14158 - protein, 9 aa, synthetic construct
EAVASVIIY

SEQ ID NO: 14159 - protein, 8 aa, synthetic construct
DKEILRMA

SEQ ID NO: 14160 - protein, 8 aa, synthetic construct
DKELRSMI

SEQ ID NO: 14161 - protein, 11 aa, synthetic construct
TAGALRAAGAL

SEQ ID NO: 14162 - protein, 8 aa, synthetic construct
EDKLYKVY

SEQ ID NO: 14163 - protein, 10 aa, synthetic construct
TAAVLQGKLA

SEQ ID NO: 14164 - protein, 9 aa, synthetic construct
ATAAARRRV

SEQ ID NO: 14165 - protein, 9 aa, synthetic construct
FTTPAPGPA

SEQ ID NO: 14166 - protein, 9 aa, synthetic construct
ESAESIEIY

SEQ ID NO: 14167 - protein, 9 aa, synthetic construct
YPSSFKFMS

SEQ ID NO: 14168 - protein, 9 aa, synthetic construct
LDTAQQNLY

SEQ ID NO: 14169 - protein, 10 aa, synthetic construct
LDTASAICNY

SEQ ID NO: 14170 - protein, 9 aa, synthetic construct
DATKGDDLL

SEQ ID NO: 14171 - protein, 12 aa, synthetic construct
QNLSLENGAGAA

SEQ ID NO: 14172 - protein, 10 aa, synthetic construct
VNDNAPTFHN

SEQ ID NO: 14173 - protein, 9 aa, synthetic construct
YLDFKLDPG

SEQ ID NO: 14174 - protein, 9 aa, synthetic construct
ATDQPVIRG

SEQ ID NO: 14175 - protein, 10 aa, synthetic construct
LVDAEGGDIY

SEQ ID NO: 14176 - protein, 10 aa, synthetic construct
YLATDPVTGD

SEQ ID NO: 14177 - protein, 10 aa, synthetic construct
VEAWYGSDEY

SEQ ID NO: 14178 - protein, 10 aa, synthetic construct
PSSMMVKDEY

SEQ ID NO: 14179 - protein, 9 aa, synthetic construct
IKPQSHYNH

SEQ ID NO: 14180 - protein, 8 aa, synthetic construct
ASHCWKMY

SEQ ID NO: 14181 - protein, 11 aa, synthetic construct
EKIQGAQKEPG

SEQ ID NO: 14182 - protein, 9 aa, synthetic construct
IYGDLEFMN

SEQ ID NO: 14183 - protein, 9 aa, synthetic construct
YGEVMLENY

SEQ ID NO: 14184 - protein, 10 aa, synthetic construct
LTMVTEGGMY

SEQ ID NO: 14185 - protein, 9 aa, synthetic construct
CCIDPLIYY

SEQ ID NO: 14186 - protein, 9 aa, synthetic construct
LVTSEASYY

SEQ ID NO: 14187 - protein, 9 aa, synthetic construct
YSERAMLYY

SEQ ID NO: 14188 - protein, 9 aa, synthetic construct
KDTGEPVIY

SEQ ID NO: 14189 - protein, 9 aa, synthetic construct
QHPGQLPVY

SEQ ID NO: 14190 - protein, 11 aa, synthetic construct
TIMSKILKCAG

SEQ ID NO: 14191 - protein, 10 aa, synthetic construct
ATFGYVAGLV

SEQ ID NO: 14192 - protein, 9 aa, synthetic construct
ATFSGRRGH

SEQ ID NO: 14193 - protein, 9 aa, synthetic construct
FDVSSPLTY

SEQ ID NO: 14194 - protein, 9 aa, synthetic construct
TAFLPKVQS

SEQ ID NO: 14195 - protein, 10 aa, synthetic construct
TAFPSVALKG

SEQ ID NO: 14196 - protein, 9 aa, synthetic construct
ATYNSIINP

SEQ ID NO: 14197 - protein, 9 aa, synthetic construct
TAQIEKMTA

SEQ ID NO: 14198 - protein, 11 aa, synthetic construct
ATGSMDTTAKL

SEQ ID NO: 14199 - protein, 10 aa, synthetic construct
FATGYTFAFP

SEQ ID NO: 14200 - protein, 9 aa, synthetic construct
ATHPSSLRK

SEQ ID NO: 14201 - protein, 10 aa, synthetic construct
TAAHSVRIAA

SEQ ID NO: 14202 - protein, 10 aa, synthetic construct
ATHVISLQGA

SEQ ID NO: 14203 - protein, 10 aa, synthetic construct
TALAAHPQLA

SEQ ID NO: 14204 - protein, 11 aa, synthetic construct
AESIPELSSAL

SEQ ID NO: 14205 - protein, 10 aa, synthetic construct
LSMHQTISAI

SEQ ID NO: 14206 - protein, 9 aa, synthetic construct
LADLATAQV

SEQ ID NO: 14207 - protein, 9 aa, synthetic construct
TAILDKLIT

SEQ ID NO: 14208 - protein, 10 aa, synthetic construct
ATLLKQLKEA

SEQ ID NO: 14209 - protein, 10 aa, synthetic construct
TMTVSTTVGY

SEQ ID NO: 14210 - protein, 9 aa, synthetic construct
ATMLQVKIY

SEQ ID NO: 14211 - protein, 13 aa, synthetic construct
VLSAAALCVGVGS

SEQ ID NO: 14212 - protein, 10 aa, synthetic construct
ALQRLGELGP

SEQ ID NO: 14213 - protein, 12 aa, synthetic construct
AVTDPGQPLLPG

SEQ ID NO: 14214 - protein, 10 aa, synthetic construct
QVFVLVALPG

SEQ ID NO: 14215 - protein, 10 aa, synthetic construct
AFNSAISLPG

SEQ ID NO: 14216 - protein, 12 aa, synthetic construct
EDTAHILIAAQL

SEQ ID NO: 14217 - protein, 14 aa, synthetic construct
TLASARPGPGVPAT

SEQ ID NO: 14218 - protein, 11 aa, synthetic construct
TAKLTLEEAYR

SEQ ID NO: 14219 - protein, 9 aa, synthetic construct
ATLTIHLQD

SEQ ID NO: 14220 - protein, 11 aa, synthetic construct
VGMVRLTQHLS

SEQ ID NO: 14221 - protein, 10 aa, synthetic construct
DVNKPAWGVS

SEQ ID NO: 14222 - protein, 9 aa, synthetic construct
SLPTTPFYF

SEQ ID NO: 14223 - protein, 9 aa, synthetic construct
LENPMLETA

SEQ ID NO: 14224 - protein, 12 aa, synthetic construct
EPGATAFRLDTA

SEQ ID NO: 14225 - protein, 8 aa, synthetic construct
TAEKVPSL

SEQ ID NO: 14226 - protein, 12 aa, synthetic construct
ATGTAAASRCIK

SEQ ID NO: 14227 - protein, 9 aa, synthetic construct
NAKKQEIIK

SEQ ID NO: 14228 - protein, 8 aa, synthetic construct
ATLRMKLV

SEQ ID NO: 14229 - protein, 9 aa, synthetic construct
LDFTPNAYL

SEQ ID NO: 14230 - protein, 10 aa, synthetic construct
ALSLVKVAPG

SEQ ID NO: 14231 - protein, 10 aa, synthetic construct
KVSVVPVGIG

SEQ ID NO: 14232 - protein, 9 aa, synthetic construct
LSALVYKLK

SEQ ID NO: 14233 - protein, 10 aa, synthetic construct
IEAQAALGRD

SEQ ID NO: 14234 - protein, 12 aa, synthetic construct
EIAADAAAVAAA

SEQ ID NO: 14235 - protein, 11 aa, synthetic construct
LEAQLQAQSLE

SEQ ID NO: 14236 - protein, 10 aa, synthetic construct
LAEQQRAEER

SEQ ID NO: 14237 - protein, 9 aa, synthetic construct
ATYVERAQI

SEQ ID NO: 14238 - protein, 11 aa, synthetic construct
AKDRIGGRVWD

SEQ ID NO: 14239 - protein, 11 aa, synthetic construct
MAVTPNSRKPR

SEQ ID NO: 14240 - protein, 9 aa, synthetic construct
GLALIFGKY

SEQ ID NO: 14241 - protein, 11 aa, synthetic construct
AVAVTAAPGPK

SEQ ID NO: 14242 - protein, 11 aa, synthetic construct
IGGLPAPEMYV

SEQ ID NO: 14243 - protein, 13 aa, synthetic construct
ARGSAFTSVPQLG

SEQ ID NO: 14244 - protein, 10 aa, synthetic construct
LGALLMAGQY

SEQ ID NO: 14245 - protein, 8 aa, synthetic construct
MIKQELQY

SEQ ID NO: 14246 - protein, 9 aa, synthetic construct
GIAQMLEKY

SEQ ID NO: 14247 - protein, 10 aa, synthetic construct
AVAARRGAAL

SEQ ID NO: 14248 - protein, 10 aa, synthetic construct
AIGLLGNLAV

SEQ ID NO: 14249 - protein, 9 aa, synthetic construct
LAGPVASAL

SEQ ID NO: 14250 - protein, 10 aa, synthetic construct
AVAEAILPKG

SEQ ID NO: 14251 - protein, 9 aa, synthetic construct
LGLVCEADY

SEQ ID NO: 14252 - protein, 9 aa, synthetic construct
TGLCDLVFQ

SEQ ID NO: 14253 - protein, 9 aa, synthetic construct
AVDSRWSSY

SEQ ID NO: 14254 - protein, 10 aa, synthetic construct
LGDLSIHSLP

SEQ ID NO: 14255 - protein, 10 aa, synthetic construct
AVQDDLGGIY

SEQ ID NO: 14256 - protein, 9 aa, synthetic construct
VIDQQNGLY

SEQ ID NO: 14257 - protein, 9 aa, synthetic construct
AVEGRPIPP

SEQ ID NO: 14258 - protein, 9 aa, synthetic construct
NFLEAGTGL

SEQ ID NO: 14259 - protein, 10 aa, synthetic construct
LGFGVTGLEL

SEQ ID NO: 14260 - protein, 10 aa, synthetic construct
GIFLWRKAGN

SEQ ID NO: 14261 - protein, 10 aa, synthetic construct
AVFKGRGRDR

SEQ ID NO: 14262 - protein, 8 aa, synthetic construct
VDKFGLIY

SEQ ID NO: 14263 - protein, 7 aa, synthetic construct
LNHLYFY

SEQ ID NO: 14264 - protein, 9 aa, synthetic construct
VAGVAAATT

SEQ ID NO: 14265 - protein, 9 aa, synthetic construct
LGLFGFTAY

SEQ ID NO: 14266 - protein, 9 aa, synthetic construct
VTEVGLSAY

SEQ ID NO: 14267 - protein, 9 aa, synthetic construct
GLEVVGRVQ

SEQ ID NO: 14268 - protein, 10 aa, synthetic construct
AVLEEDEEVT

SEQ ID NO: 14269 - protein, 11 aa, synthetic construct
LGLESDCRFSP

SEQ ID NO: 14270 - protein, 12 aa, synthetic construct
VAIGSVAGLTVS

SEQ ID NO: 14271 - protein, 10 aa, synthetic construct
GILNLSDITK

SEQ ID NO: 14272 - protein, 11 aa, synthetic construct
LGLFDDRSSAI

SEQ ID NO: 14273 - protein, 8 aa, synthetic construct
LGVEKMSI

SEQ ID NO: 14274 - protein, 9 aa, synthetic construct
VARLAAKAL

SEQ ID NO: 14275 - protein, 8 aa, synthetic construct
VALKKLLI

SEQ ID NO: 14276 - protein, 9 aa, synthetic construct
IGLIWGLSL

SEQ ID NO: 14277 - protein, 9 aa, synthetic construct
IQRKKVAVI

SEQ ID NO: 14278 - protein, 10 aa, synthetic construct
AVIFDVASII

SEQ ID NO: 14279 - protein, 10 aa, synthetic construct
VAVELLKEKA

SEQ ID NO: 14280 - protein, 10 aa, synthetic construct
LGISTRGKLA

SEQ ID NO: 14281 - protein, 10 aa, synthetic construct
AVLYQVLEMK

SEQ ID NO: 14282 - protein, 10 aa, synthetic construct
GIMFLVGSKI

SEQ ID NO: 14283 - protein, 9 aa, synthetic construct
LVYQMLKGL

SEQ ID NO: 14284 - protein, 10 aa, synthetic construct
IGSSAGLLAL

SEQ ID NO: 14285 - protein, 9 aa, synthetic construct
VAPTITGNL

SEQ ID NO: 14286 - protein, 9 aa, synthetic construct
VASLTMVAL

SEQ ID NO: 14287 - protein, 11 aa, synthetic construct
LGIGPLVAKLG

SEQ ID NO: 14288 - protein, 10 aa, synthetic construct
GIPTLGKNVV

SEQ ID NO: 14289 - protein, 10 aa, synthetic construct
KGRVAIAVAI

SEQ ID NO: 14290 - protein, 11 aa, synthetic construct
AVLDLALDTIK

SEQ ID NO: 14291 - protein, 10 aa, synthetic construct
LGVWVGVSAF

SEQ ID NO: 14292 - protein, 9 aa, synthetic construct
TVVANITVY

SEQ ID NO: 14293 - protein, 9 aa, synthetic construct
LSAFSQGAV

SEQ ID NO: 14294 - protein, 9 aa, synthetic construct
GLTFIKQIA

SEQ ID NO: 14295 - protein, 9 aa, synthetic construct
AVVGRLFQK

SEQ ID NO: 14296 - protein, 9 aa, synthetic construct
GVLGANLLY

SEQ ID NO: 14297 - protein, 8 aa, synthetic construct
GIVPVGKI

SEQ ID NO: 14298 - protein, 9 aa, synthetic construct
RLYGMIYKP

SEQ ID NO: 14299 - protein, 10 aa, synthetic construct
GIYSIHGFPP

SEQ ID NO: 14300 - protein, 10 aa, synthetic construct
EWGGAVPSIL

SEQ ID NO: 14301 - protein, 12 aa, synthetic construct
AVDSLSHPAVNL

SEQ ID NO: 14302 - protein, 12 aa, synthetic construct
LGYGKEGKGNSI

SEQ ID NO: 14303 - protein, 9 aa, synthetic construct
ELLAEAKYY

SEQ ID NO: 14304 - protein, 9 aa, synthetic construct
AVMRPPLWE

SEQ ID NO: 14305 - protein, 8 aa, synthetic construct
NDDPFGVF

SEQ ID NO: 14306 - protein, 9 aa, synthetic construct
MVGLAADWL

SEQ ID NO: 14307 - protein, 9 aa, synthetic construct
WAAEVISTM

SEQ ID NO: 14308 - protein, 10 aa, synthetic construct
EALCGVPVLV

SEQ ID NO: 14309 - protein, 7 aa, synthetic construct
YAAEERI

SEQ ID NO: 14310 - protein, 9 aa, synthetic construct
FSLAHLLII

SEQ ID NO: 14311 - protein, 9 aa, synthetic construct
YDALAGEFI

SEQ ID NO: 14312 - protein, 7 aa, synthetic construct
YENKDYI

SEQ ID NO: 14313 - protein, 10 aa, synthetic construct
YSTYSPNIAL

SEQ ID NO: 14314 - protein, 9 aa, synthetic construct
RNTFMMIAL

SEQ ID NO: 14315 - protein, 9 aa, synthetic construct
AYKAAVDSF

SEQ ID NO: 14316 - protein, 9 aa, synthetic construct
LSFDMILMS

SEQ ID NO: 14317 - protein, 9 aa, synthetic construct
FSDTRYNQR

SEQ ID NO: 14318 - protein, 9 aa, synthetic construct
FSGNIYHIL

SEQ ID NO: 14319 - protein, 9 aa, synthetic construct
MSKSASFAF

SEQ ID NO: 14320 - protein, 9 aa, synthetic construct
SPKEGWQVY

SEQ ID NO: 14321 - protein, 9 aa, synthetic construct
LTDLISFVF

SEQ ID NO: 14322 - protein, 9 aa, synthetic construct
YVLTNVAYF

SEQ ID NO: 14323 - protein, 9 aa, synthetic construct
FSILNYSVF

SEQ ID NO: 14324 - protein, 8 aa, synthetic construct
FSLHPLTV

SEQ ID NO: 14325 - protein, 10 aa, synthetic construct
AYGSLVFVLL

SEQ ID NO: 14326 - protein, 9 aa, synthetic construct
SFITSVYNF

SEQ ID NO: 14327 - protein, 9 aa, synthetic construct
AYEIYSFKF

SEQ ID NO: 14328 - protein, 9 aa, synthetic construct
IYAFDSWLS

SEQ ID NO: 14329 - protein, 9 aa, synthetic construct
LSFAIKVLF

SEQ ID NO: 14330 - protein, 10 aa, synthetic construct
FSLGGLNHLL

SEQ ID NO: 14331 - protein, 10 aa, synthetic construct
FSIPVSADGF

SEQ ID NO: 14332 - protein, 12 aa, synthetic construct
LSFSSGQKANGF

SEQ ID NO: 14333 - protein, 9 aa, synthetic construct
AYLSKAEIY

SEQ ID NO: 14334 - protein, 10 aa, synthetic construct
YAISSSVISF

SEQ ID NO: 14335 - protein, 9 aa, synthetic construct
TLEMIAYLF

SEQ ID NO: 14336 - protein, 9 aa, synthetic construct
YSFPELTYL

SEQ ID NO: 14337 - protein, 9 aa, synthetic construct
FTASRFMAY

SEQ ID NO: 14338 - protein, 11 aa, synthetic construct
SFPAIQAAPSF

SEQ ID NO: 14339 - protein, 9 aa, synthetic construct
HQSFFLYLL

SEQ ID NO: 14340 - protein, 10 aa, synthetic construct
MIAPWGGFTY

SEQ ID NO: 14341 - protein, 10 aa, synthetic construct
FSSSRGQDHP

SEQ ID NO: 14342 - protein, 11 aa, synthetic construct
GTSNGRGFSHP

SEQ ID NO: 14343 - protein, 12 aa, synthetic construct
FSSSSSTGSISA

SEQ ID NO: 14344 - protein, 11 aa, synthetic construct
PSRVHASEVES

SEQ ID NO: 14345 - protein, 10 aa, synthetic construct
FSVTYSVSQS

SEQ ID NO: 14346 - protein, 9 aa, synthetic construct
FSKMATSWF

SEQ ID NO: 14347 - protein, 10 aa, synthetic construct
FSVPQMAVPE

SEQ ID NO: 14348 - protein, 9 aa, synthetic construct
FKDKLLIMA

SEQ ID NO: 14349 - protein, 8 aa, synthetic construct
AYVKRWLW

SEQ ID NO: 14350 - protein, 10 aa, synthetic construct
SFHLFPAALM

SEQ ID NO: 14351 - protein, 10 aa, synthetic construct
SVFSTWHKAA

SEQ ID NO: 14352 - protein, 11 aa, synthetic construct
FSVPAGPPAQY

SEQ ID NO: 14353 - protein, 8 aa, synthetic construct
QTVAMAIA

SEQ ID NO: 14354 - protein, 10 aa, synthetic construct
AVAAMTGLAL

SEQ ID NO: 14355 - protein, 11 aa, synthetic construct
AVAAMTGLALL

SEQ ID NO: 14356 - protein, 9 aa, synthetic construct
MIDPSGVSY

SEQ ID NO: 14357 - protein, 8 aa, synthetic construct
TAEEWVSY

SEQ ID NO: 14358 - protein, 9 aa, synthetic construct
SMAYAKLML

SEQ ID NO: 14359 - protein, 10 aa, synthetic construct
MAFFIALGSA

SEQ ID NO: 14360 - protein, 9 aa, synthetic construct
APSTMQSAF

SEQ ID NO: 14361 - protein, 10 aa, synthetic construct
IMAELLQGKA

SEQ ID NO: 14362 - protein, 8 aa, synthetic construct
LAMSWLSL

SEQ ID NO: 14363 - protein, 10 aa, synthetic construct
AMIVGYLGSI

SEQ ID NO: 14364 - protein, 7 aa, synthetic construct
MVQLTTV

SEQ ID NO: 14365 - protein, 9 aa, synthetic construct
LLEMGNAAR

SEQ ID NO: 14366 - protein, 9 aa, synthetic construct
MNASQLIDI

SEQ ID NO: 14367 - protein, 10 aa, synthetic construct
AMARSMESRS

SEQ ID NO: 14368 - protein, 9 aa, synthetic construct
MAIMYSAVT

SEQ ID NO: 14369 - protein, 9 aa, synthetic construct
LRGTGGALV

SEQ ID NO: 14370 - protein, 9 aa, synthetic construct
VMAIPAILI

SEQ ID NO: 14371 - protein, 10 aa, synthetic construct
LMFESGAVAV

SEQ ID NO: 14372 - protein, 9 aa, synthetic construct
KGSTLEEVY

SEQ ID NO: 14373 - protein, 9 aa, synthetic construct
STLMDILLM

SEQ ID NO: 14374 - protein, 10 aa, synthetic construct
PTLPEPMAEA

SEQ ID NO: 14375 - protein, 10 aa, synthetic construct
DVHNQAVAMA

SEQ ID NO: 14376 - protein, 9 aa, synthetic construct
MSMMKTGVI

SEQ ID NO: 14377 - protein, 9 aa, synthetic construct
MFSFVDLRL

SEQ ID NO: 14378 - protein, 8 aa, synthetic construct
IVINYAMF

SEQ ID NO: 14379 - protein, 9 aa, synthetic construct
FQDDEKLYF

SEQ ID NO: 14380 - protein, 9 aa, synthetic construct
LCAIAQAES

SEQ ID NO: 14381 - protein, 9 aa, synthetic construct
ELCHKFIAP

SEQ ID NO: 14382 - protein, 9 aa, synthetic construct
FCQEMQHVI

SEQ ID NO: 14383 - protein, 12 aa, synthetic construct
QDGKSPGAGQLF

SEQ ID NO: 14384 - protein, 9 aa, synthetic construct
DIEAICLGQ

SEQ ID NO: 14385 - protein, 9 aa, synthetic construct
PQNPCIIAT

SEQ ID NO: 14386 - protein, 9 aa, synthetic construct
ICAVVVEYE

SEQ ID NO: 14387 - protein, 10 aa, synthetic construct
LCKKLGGSCV

SEQ ID NO: 14388 - protein, 9 aa, synthetic construct
LCVSSFFAI

SEQ ID NO: 14389 - protein, 11 aa, synthetic construct
CLYGVAASALG

SEQ ID NO: 14390 - protein, 11 aa, synthetic construct
SLYSSCGTSNS

SEQ ID NO: 14391 - protein, 10 aa, synthetic construct
GQNIDGQNLY

SEQ ID NO: 14392 - protein, 8 aa, synthetic construct
CGLIPPTY

SEQ ID NO: 14393 - protein, 8 aa, synthetic construct
EDRNILVF

SEQ ID NO: 14394 - protein, 8 aa, synthetic construct
KMMDKVEF

SEQ ID NO: 14395 - protein, 10 aa, synthetic construct
VLNGGERVLY

SEQ ID NO: 14396 - protein, 8 aa, synthetic construct
MNCDKVGY

SEQ ID NO: 14397 - protein, 12 aa, synthetic construct
VICSSRATVMLY

SEQ ID NO: 14398 - protein, 11 aa, synthetic construct
LGVCANGLLIY

SEQ ID NO: 14399 - protein, 10 aa, synthetic construct
LCQGWHYLAY

SEQ ID NO: 14400 - protein, 9 aa, synthetic construct
AVLPCLAYD

SEQ ID NO: 14401 - protein, 9 aa, synthetic construct
EETMRFESF

SEQ ID NO: 14402 - protein, 8 aa, synthetic construct
LAQCNFSL

SEQ ID NO: 14403 - protein, 9 aa, synthetic construct
TPYEDGLYL

SEQ ID NO: 14404 - protein, 9 aa, synthetic construct
GCALFPLLG

SEQ ID NO: 14405 - protein, 8 aa, synthetic construct
TYHVRLEV

SEQ ID NO: 14406 - protein, 8 aa, synthetic construct
CKDVLPKL

SEQ ID NO: 14407 - protein, 8 aa, synthetic construct
CRFKDSML

SEQ ID NO: 14408 - protein, 9 aa, synthetic construct
CQATVFSMI

SEQ ID NO: 14409 - protein, 9 aa, synthetic construct
DMEKEVWEI

SEQ ID NO: 14410 - protein, 10 aa, synthetic construct
MDHGADHLYL

SEQ ID NO: 14411 - protein, 11 aa, synthetic construct
SGQDVGSFAYL

SEQ ID NO: 14412 - protein, 10 aa, synthetic construct
LENEPLMLQL

SEQ ID NO: 14413 - protein, 10 aa, synthetic construct
AVDSLNGLVY

SEQ ID NO: 14414 - protein, 9 aa, synthetic construct
LVHMFNTEL

SEQ ID NO: 14415 - protein, 8 aa, synthetic construct
DFCKVLVV

SEQ ID NO: 14416 - protein, 7 aa, synthetic construct
SECEKLF

SEQ ID NO: 14417 - protein, 13 aa, synthetic construct
CTMPASHLAVPAA

SEQ ID NO: 14418 - protein, 9 aa, synthetic construct
CTLKPALPT

SEQ ID NO: 14419 - protein, 9 aa, synthetic construct
CTVFVNVSF

SEQ ID NO: 14420 - protein, 10 aa, synthetic construct
KGGFSVNFMF

SEQ ID NO: 14421 - protein, 10 aa, synthetic construct
CVAPGVKMTP

SEQ ID NO: 14422 - protein, 8 aa, synthetic construct
VCLGRKIE

SEQ ID NO: 14423 - protein, 9 aa, synthetic construct
FNNSPSLSL

SEQ ID NO: 14424 - protein, 10 aa, synthetic construct
AMSGGAPYYF

SEQ ID NO: 14425 - protein, 9 aa, synthetic construct
CYGSFEWLV

SEQ ID NO: 14426 - protein, 8 aa, synthetic construct
TENSILYF

SEQ ID NO: 14427 - protein, 9 aa, synthetic construct
WADGFVIVY

SEQ ID NO: 14428 - protein, 8 aa, synthetic construct
QEWPFTVY

SEQ ID NO: 14429 - protein, 13 aa, synthetic construct
GEAGGPGAPLPGG

SEQ ID NO: 14430 - protein, 12 aa, synthetic construct
DHITAQGPGSGE

SEQ ID NO: 14431 - protein, 9 aa, synthetic construct
YEGLCRQYT

SEQ ID NO: 14432 - protein, 9 aa, synthetic construct
FANFDAFGQ

SEQ ID NO: 14433 - protein, 9 aa, synthetic construct
VMSQYSPAI

SEQ ID NO: 14434 - protein, 10 aa, synthetic construct
EGFENMPAAF

SEQ ID NO: 14435 - protein, 9 aa, synthetic construct
DYKQALVQY

SEQ ID NO: 14436 - protein, 9 aa, synthetic construct
FEVAASDTI

SEQ ID NO: 14437 - protein, 11 aa, synthetic construct
VDFGDGIAVSY

SEQ ID NO: 14438 - protein, 9 aa, synthetic construct
EGFGEGVSY

SEQ ID NO: 14439 - protein, 10 aa, synthetic construct
EGMQVNTLFE

SEQ ID NO: 14440 - protein, 8 aa, synthetic construct
DAFLKRPI

SEQ ID NO: 14441 - protein, 9 aa, synthetic construct
NSQNPALEW

SEQ ID NO: 14442 - protein, 9 aa, synthetic construct
SMVVIPTYA

SEQ ID NO: 14443 - protein, 9 aa, synthetic construct
MDAFYAAVE

SEQ ID NO: 14444 - protein, 8 aa, synthetic construct
YEKMAVME

SEQ ID NO: 14445 - protein, 9 aa, synthetic construct
EGGPRPNAD

SEQ ID NO: 14446 - protein, 10 aa, synthetic construct
QNGAFISREG

SEQ ID NO: 14447 - protein, 8 aa, synthetic construct
GSEHGFCF

SEQ ID NO: 14448 - protein, 9 aa, synthetic construct
LDAHIRLWD

SEQ ID NO: 14449 - protein, 9 aa, synthetic construct
EGHLRAVVE

SEQ ID NO: 14450 - protein, 8 aa, synthetic construct
IYWTAVTY

SEQ ID NO: 14451 - protein, 9 aa, synthetic construct
AITAEGELY

SEQ ID NO: 14452 - protein, 9 aa, synthetic construct
VKFALGSVV

SEQ ID NO: 14453 - protein, 9 aa, synthetic construct
LGSPVDALF

SEQ ID NO: 14454 - protein, 8 aa, synthetic construct
GQELFRQL

SEQ ID NO: 14455 - protein, 10 aa, synthetic construct
GTTLLMVAAY

SEQ ID NO: 14456 - protein, 9 aa, synthetic construct
VECRRLVSY

SEQ ID NO: 14457 - protein, 9 aa, synthetic construct
EVASGISSL

SEQ ID NO: 14458 - protein, 10 aa, synthetic construct
GELSNRGPMS

SEQ ID NO: 14459 - protein, 9 aa, synthetic construct
VETGISVMV

SEQ ID NO: 14460 - protein, 9 aa, synthetic construct
MAVEYNVSF

SEQ ID NO: 14461 - protein, 9 aa, synthetic construct
NSIFLRLLL

SEQ ID NO: 14462 - protein, 8 aa, synthetic construct
DAKILNKI

SEQ ID NO: 14463 - protein, 9 aa, synthetic construct
LDAKIRIFD

SEQ ID NO: 14464 - protein, 9 aa, synthetic construct
EGKKWAGIL

SEQ ID NO: 14465 - protein, 11 aa, synthetic construct
DALKSAGRALI

SEQ ID NO: 14466 - protein, 9 aa, synthetic construct
DAKVTIRKA

SEQ ID NO: 14467 - protein, 9 aa, synthetic construct
ADKTGELRD

SEQ ID NO: 14468 - protein, 10 aa, synthetic construct
DLGEAALNEY

SEQ ID NO: 14469 - protein, 11 aa, synthetic construct
ADGPPHGGVQY

SEQ ID NO: 14470 - protein, 9 aa, synthetic construct
LNENLAATQ

SEQ ID NO: 14471 - protein, 9 aa, synthetic construct
GELMLESTF

SEQ ID NO: 14472 - protein, 11 aa, synthetic construct
GALDALSLSSS

SEQ ID NO: 14473 - protein, 9 aa, synthetic construct
YNDEEVSIR

SEQ ID NO: 14474 - protein, 9 aa, synthetic construct
WLIKMTCAY

SEQ ID NO: 14475 - protein, 8 aa, synthetic construct
TKEEVLQY

SEQ ID NO: 14476 - protein, 8 aa, synthetic construct
ITPSITNW

SEQ ID NO: 14477 - protein, 9 aa, synthetic construct
ADLVEAKKL

SEQ ID NO: 14478 - protein, 8 aa, synthetic construct
YTVSLHYE

SEQ ID NO: 14479 - protein, 8 aa, synthetic construct
DAEIEAIF

SEQ ID NO: 14480 - protein, 9 aa, synthetic construct
DVPASEVTL

SEQ ID NO: 14481 - protein, 10 aa, synthetic construct
DSCPVVLHSF

SEQ ID NO: 14482 - protein, 9 aa, synthetic construct
DASLLARLF

SEQ ID NO: 14483 - protein, 8 aa, synthetic construct
VGTESTYY

SEQ ID NO: 14484 - protein, 9 aa, synthetic construct
SVSNLVTVF

SEQ ID NO: 14485 - protein, 11 aa, synthetic construct
LASQSSGIISM

SEQ ID NO: 14486 - protein, 8 aa, synthetic construct
ASYYLAVF

SEQ ID NO: 14487 - protein, 10 aa, synthetic construct
GNSSVNPIIY

SEQ ID NO: 14488 - protein, 10 aa, synthetic construct
TLGANGYVFA

SEQ ID NO: 14489 - protein, 8 aa, synthetic construct
TIVLNELY

SEQ ID NO: 14490 - protein, 9 aa, synthetic construct
GLDDSLQDY

SEQ ID NO: 14491 - protein, 9 aa, synthetic construct
DGIHQSEFL

SEQ ID NO: 14492 - protein, 9 aa, synthetic construct
EHGVALLAY

SEQ ID NO: 14493 - protein, 10 aa, synthetic construct
LAIMGNSSEF

SEQ ID NO: 14494 - protein, 9 aa, synthetic construct
DAVEMLASY

SEQ ID NO: 14495 - protein, 8 aa, synthetic construct
TMRKREVY

SEQ ID NO: 14496 - protein, 8 aa, synthetic construct
ESGIYTEH

SEQ ID NO: 14497 - protein, 9 aa, synthetic construct
LGDMAGQEV

SEQ ID NO: 14498 - protein, 9 aa, synthetic construct
QGAENAYTV

SEQ ID NO: 14499 - protein, 10 aa, synthetic construct
DAVTNPANGF

SEQ ID NO: 14500 - protein, 8 aa, synthetic construct
EVGKHVVL

SEQ ID NO: 14501 - protein, 8 aa, synthetic construct
EGPLRPVL

SEQ ID NO: 14502 - protein, 8 aa, synthetic construct
EGVLPRPL

SEQ ID NO: 14503 - protein, 8 aa, synthetic construct
DVLGSQVI

SEQ ID NO: 14504 - protein, 10 aa, synthetic construct
GEGREAALSF

SEQ ID NO: 14505 - protein, 14 aa, synthetic construct
RFHCVFSGGGGGAF

SEQ ID NO: 14506 - protein, 10 aa, synthetic construct
WWPAPGSSPW

SEQ ID NO: 14507 - protein, 10 aa, synthetic construct
GESFIHSAAV

SEQ ID NO: 14508 - protein, 9 aa, synthetic construct
YAYTMESTD

SEQ ID NO: 14509 - protein, 8 aa, synthetic construct
DFSRIVLL

SEQ ID NO: 14510 - protein, 10 aa, synthetic construct
FSDTLSQKAD

SEQ ID NO: 14511 - protein, 9 aa, synthetic construct
EGYEQDFAV

SEQ ID NO: 14512 - protein, 10 aa, synthetic construct
KPDPMCVFTY

SEQ ID NO: 14513 - protein, 11 aa, synthetic construct
NGKLVINGNSI

SEQ ID NO: 14514 - protein, 11 aa, synthetic construct
SAGFGDSVVQY

SEQ ID NO: 14515 - protein, 9 aa, synthetic construct
AWEEKGETF

SEQ ID NO: 14516 - protein, 13 aa, synthetic construct
QGACSSAGGEDEA

SEQ ID NO: 14517 - protein, 10 aa, synthetic construct
IQPDSHSLSY

SEQ ID NO: 14518 - protein, 10 aa, synthetic construct
LGVGMEQLAY

SEQ ID NO: 14519 - protein, 9 aa, synthetic construct
EIPQEMESF

SEQ ID NO: 14520 - protein, 8 aa, synthetic construct
NEGDHSFY

SEQ ID NO: 14521 - protein, 7 aa, synthetic construct
DDKEVHK

SEQ ID NO: 14522 - protein, 9 aa, synthetic construct
VPSAEDEPA

SEQ ID NO: 14523 - protein, 10 aa, synthetic construct
TVKEIDLVLK

SEQ ID NO: 14524 - protein, 10 aa, synthetic construct
DEWIDISVSD

SEQ ID NO: 14525 - protein, 12 aa, synthetic construct
RERGSRSEEPGA

SEQ ID NO: 14526 - protein, 10 aa, synthetic construct
EDVQSPLQNP

SEQ ID NO: 14527 - protein, 11 aa, synthetic construct
DELYQRMLKGP

SEQ ID NO: 14528 - protein, 10 aa, synthetic construct
DENSLVPPAP

SEQ ID NO: 14529 - protein, 9 aa, synthetic construct
QEQKKRALD

SEQ ID NO: 14530 - protein, 10 aa, synthetic construct
EDSGLMVFKA

SEQ ID NO: 14531 - protein, 10 aa, synthetic construct
EDSGRVASYI

SEQ ID NO: 14532 - protein, 9 aa, synthetic construct
NSVDEYQFF

SEQ ID NO: 14533 - protein, 8 aa, synthetic construct
METLTKVL

SEQ ID NO: 14534 - protein, 8 aa, synthetic construct
DFSLLHDE

SEQ ID NO: 14535 - protein, 9 aa, synthetic construct
FDDYMKALE

SEQ ID NO: 14536 - protein, 9 aa, synthetic construct
SDFDVFPSS

SEQ ID NO: 14537 - protein, 9 aa, synthetic construct
FGTESSLSM

SEQ ID NO: 14538 - protein, 11 aa, synthetic construct
TSAGSSGVISF

SEQ ID NO: 14539 - protein, 10 aa, synthetic construct
LAHVTMEAEM

SEQ ID NO: 14540 - protein, 9 aa, synthetic construct
FFKDTKFPM

SEQ ID NO: 14541 - protein, 8 aa, synthetic construct
DLYNKVIL

SEQ ID NO: 14542 - protein, 8 aa, synthetic construct
DFKKVLGL

SEQ ID NO: 14543 - protein, 9 aa, synthetic construct
ISLEKLKDF

SEQ ID NO: 14544 - protein, 9 aa, synthetic construct
DFYILDEKF

SEQ ID NO: 14545 - protein, 10 aa, synthetic construct
DFKSGNIKIL

SEQ ID NO: 14546 - protein, 9 aa, synthetic construct
DFKLELSRL

SEQ ID NO: 14547 - protein, 8 aa, synthetic construct
DFILKIEP

SEQ ID NO: 14548 - protein, 10 aa, synthetic construct
DFPAHRAVLA

SEQ ID NO: 14549 - protein, 10 aa, synthetic construct
IRPFSTSIAI

SEQ ID NO: 14550 - protein, 10 aa, synthetic construct
VDFVQFYIQI

SEQ ID NO: 14551 - protein, 11 aa, synthetic construct
GESGGFQVVTF

SEQ ID NO: 14552 - protein, 9 aa, synthetic construct
SMTPAQADL

SEQ ID NO: 14553 - protein, 10 aa, synthetic construct
VQDSLDLHKG

SEQ ID NO: 14554 - protein, 10 aa, synthetic construct
PRDLSLDPQA

SEQ ID NO: 14555 - protein, 8 aa, synthetic construct
DGKLKLSL

SEQ ID NO: 14556 - protein, 9 aa, synthetic construct
SHATGAWVF

SEQ ID NO: 14557 - protein, 8 aa, synthetic construct
NSVYTNVL

SEQ ID NO: 14558 - protein, 10 aa, synthetic construct
NGVPVSVSPA

SEQ ID NO: 14559 - protein, 10 aa, synthetic construct
MSSLMDCRTY

SEQ ID NO: 14560 - protein, 9 aa, synthetic construct
EFASEYEAF

SEQ ID NO: 14561 - protein, 9 aa, synthetic construct
DNDIYNHMY

SEQ ID NO: 14562 - protein, 9 aa, synthetic construct
NDYVALVHP

SEQ ID NO: 14563 - protein, 9 aa, synthetic construct
SEAFQVEEY

SEQ ID NO: 14564 - protein, 9 aa, synthetic construct
VEAPFIPKY

SEQ ID NO: 14565 - protein, 11 aa, synthetic construct
VEAVAEAWPGL

SEQ ID NO: 14566 - protein, 12 aa, synthetic construct
DLASAIGDVPPS

SEQ ID NO: 14567 - protein, 8 aa, synthetic construct
DLFFFPLY

SEQ ID NO: 14568 - protein, 9 aa, synthetic construct
LDFPEAMVL

SEQ ID NO: 14569 - protein, 9 aa, synthetic construct
FIDSYVLEY

SEQ ID NO: 14570 - protein, 7 aa, synthetic construct
LLQETYE

SEQ ID NO: 14571 - protein, 10 aa, synthetic construct
DLQARDAGEY

SEQ ID NO: 14572 - protein, 10 aa, synthetic construct
IDLTVSLTSI

SEQ ID NO: 14573 - protein, 9 aa, synthetic construct
LDRMVVLLS

SEQ ID NO: 14574 - protein, 8 aa, synthetic construct
DLHKQNQL

SEQ ID NO: 14575 - protein, 10 aa, synthetic construct
ITQCPVVPHS

SEQ ID NO: 14576 - protein, 9 aa, synthetic construct
DLLKLPAKL

SEQ ID NO: 14577 - protein, 8 aa, synthetic construct
LDLRQKVL

SEQ ID NO: 14578 - protein, 8 aa, synthetic construct
FDIISDFV

SEQ ID NO: 14579 - protein, 9 aa, synthetic construct
LALYKKLLD

SEQ ID NO: 14580 - protein, 8 aa, synthetic construct
DIKAGNIL

SEQ ID NO: 14581 - protein, 9 aa, synthetic construct
EVKKPRASV

SEQ ID NO: 14582 - protein, 11 aa, synthetic construct
VLSGVLEASKA

SEQ ID NO: 14583 - protein, 11 aa, synthetic construct
DLAFKFEGMGV

SEQ ID NO: 14584 - protein, 10 aa, synthetic construct
NIKLVKNGEN

SEQ ID NO: 14585 - protein, 10 aa, synthetic construct
DLKSPVSRVE

SEQ ID NO: 14586 - protein, 9 aa, synthetic construct
EVLKRQLED

SEQ ID NO: 14587 - protein, 8 aa, synthetic construct
LDKFIKEF

SEQ ID NO: 14588 - protein, 10 aa, synthetic construct
LDLGKLVSSV

SEQ ID NO: 14589 - protein, 11 aa, synthetic construct
DLIKFIMSLKS

SEQ ID NO: 14590 - protein, 8 aa, synthetic construct
LDKLKVNI

SEQ ID NO: 14591 - protein, 9 aa, synthetic construct
LDKIVQKVL

SEQ ID NO: 14592 - protein, 9 aa, synthetic construct
GLKRIDPNY

SEQ ID NO: 14593 - protein, 10 aa, synthetic construct
SLTQIKEKVL

SEQ ID NO: 14594 - protein, 9 aa, synthetic construct
DLKSLAKRI

SEQ ID NO: 14595 - protein, 10 aa, synthetic construct
EVVKLGAASL

SEQ ID NO: 14596 - protein, 10 aa, synthetic construct
DLKGAVLFLM

SEQ ID NO: 14597 - protein, 9 aa, synthetic construct
DLLFWTMKM

SEQ ID NO: 14598 - protein, 9 aa, synthetic construct
DLLEKIYRL

SEQ ID NO: 14599 - protein, 8 aa, synthetic construct
EVLKPKLL

SEQ ID NO: 14600 - protein, 9 aa, synthetic construct
LDILSRIHT

SEQ ID NO: 14601 - protein, 9 aa, synthetic construct
GDLNYLIYV

SEQ ID NO: 14602 - protein, 10 aa, synthetic construct
EVLPHGGPQY

SEQ ID NO: 14603 - protein, 9 aa, synthetic construct
DKGEEQVNF

SEQ ID NO: 14604 - protein, 9 aa, synthetic construct
NLSEQNDVF

SEQ ID NO: 14605 - protein, 9 aa, synthetic construct
EVNEVSQNF

SEQ ID NO: 14606 - protein, 9 aa, synthetic construct
FSKGCPPLF

SEQ ID NO: 14607 - protein, 10 aa, synthetic construct
IDIPENVDIT

SEQ ID NO: 14608 - protein, 9 aa, synthetic construct
IDYNPLEKK

SEQ ID NO: 14609 - protein, 10 aa, synthetic construct
HATGNWGYLD

SEQ ID NO: 14610 - protein, 9 aa, synthetic construct
SFLVEPDIY

SEQ ID NO: 14611 - protein, 10 aa, synthetic construct
LNLLDAWYDL

SEQ ID NO: 14612 - protein, 11 aa, synthetic construct
YEVSQVNGKDL

SEQ ID NO: 14613 - protein, 12 aa, synthetic construct
PMPHSSSIANLQ

SEQ ID NO: 14614 - protein, 12 aa, synthetic construct
KVTKGAFGDMLD

SEQ ID NO: 14615 - protein, 8 aa, synthetic construct
DLPLHLNA

SEQ ID NO: 14616 - protein, 9 aa, synthetic construct
DIRASEHWI

SEQ ID NO: 14617 - protein, 9 aa, synthetic construct
DLRKLKRQL

SEQ ID NO: 14618 - protein, 11 aa, synthetic construct
ASRVAGTTEML

SEQ ID NO: 14619 - protein, 8 aa, synthetic construct
LDRKPILS

SEQ ID NO: 14620 - protein, 8 aa, synthetic construct
DLTHKKIK

SEQ ID NO: 14621 - protein, 8 aa, synthetic construct
KQQPQLLK

SEQ ID NO: 14622 - protein, 8 aa, synthetic construct
DLIRPQIK

SEQ ID NO: 14623 - protein, 9 aa, synthetic construct
DISKLRNTL

SEQ ID NO: 14624 - protein, 11 aa, synthetic construct
DLSAAMHRDLS

SEQ ID NO: 14625 - protein, 11 aa, synthetic construct
EVESFLVHPGD

SEQ ID NO: 14626 - protein, 8 aa, synthetic construct
TLDGKVQY

SEQ ID NO: 14627 - protein, 11 aa, synthetic construct
IDSSMKNFKAF

SEQ ID NO: 14628 - protein, 9 aa, synthetic construct
EVWFSGLKL

SEQ ID NO: 14629 - protein, 8 aa, synthetic construct
EVEKYQQL

SEQ ID NO: 14630 - protein, 10 aa, synthetic construct
LDYETKTSYM

SEQ ID NO: 14631 - protein, 11 aa, synthetic construct
INYNGVNITDL

SEQ ID NO: 14632 - protein, 8 aa, synthetic construct
KDIEELLR

SEQ ID NO: 14633 - protein, 9 aa, synthetic construct
DKLEAQLKA

SEQ ID NO: 14634 - protein, 11 aa, synthetic construct
ATAVMPDGQFK

SEQ ID NO: 14635 - protein, 8 aa, synthetic construct
DLRLLSYI

SEQ ID NO: 14636 - protein, 10 aa, synthetic construct
EVAYLGNEVS

SEQ ID NO: 14637 - protein, 8 aa, synthetic construct
DLAGTRSR

SEQ ID NO: 14638 - protein, 10 aa, synthetic construct
NLEMNGDSLM

SEQ ID NO: 14639 - protein, 10 aa, synthetic construct
DIVTSENSME

SEQ ID NO: 14640 - protein, 9 aa, synthetic construct
EDVISPYLE

SEQ ID NO: 14641 - protein, 9 aa, synthetic construct
DLRVEKESL

SEQ ID NO: 14642 - protein, 9 aa, synthetic construct
DRKALFLEL

SEQ ID NO: 14643 - protein, 7 aa, synthetic construct
DIIQKKI

SEQ ID NO: 14644 - protein, 9 aa, synthetic construct
DIHLRERLA

SEQ ID NO: 14645 - protein, 10 aa, synthetic construct
LNGPNQLMSL

SEQ ID NO: 14646 - protein, 10 aa, synthetic construct
DLHSLLQLDA

SEQ ID NO: 14647 - protein, 9 aa, synthetic construct
EIHDLFQSF

SEQ ID NO: 14648 - protein, 9 aa, synthetic construct
DLELIKYLN

SEQ ID NO: 14649 - protein, 9 aa, synthetic construct
SLGILDVVI

SEQ ID NO: 14650 - protein, 9 aa, synthetic construct
YAPEDIIEY

SEQ ID NO: 14651 - protein, 8 aa, synthetic construct
LDLFVHAI

SEQ ID NO: 14652 - protein, 9 aa, synthetic construct
LDIAKVTLS

SEQ ID NO: 14653 - protein, 9 aa, synthetic construct
DLLIAVKSV

SEQ ID NO: 14654 - protein, 10 aa, synthetic construct
DILKQFTKAA

SEQ ID NO: 14655 - protein, 11 aa, synthetic construct
IDLNKKGKDNK

SEQ ID NO: 14656 - protein, 9 aa, synthetic construct
GEKLDIYLP

SEQ ID NO: 14657 - protein, 9 aa, synthetic construct
EVKQLSCLS

SEQ ID NO: 14658 - protein, 9 aa, synthetic construct
DLLREMISS

SEQ ID NO: 14659 - protein, 10 aa, synthetic construct
IDLLVETSSS

SEQ ID NO: 14660 - protein, 9 aa, synthetic construct
LDLQMEVVT

SEQ ID NO: 14661 - protein, 8 aa, synthetic construct
IDKATGKI

SEQ ID NO: 14662 - protein, 8 aa, synthetic construct
DLKGIYTR

SEQ ID NO: 14663 - protein, 9 aa, synthetic construct
DLKSLATAL

SEQ ID NO: 14664 - protein, 9 aa, synthetic construct
EVKEKVVTI

SEQ ID NO: 14665 - protein, 9 aa, synthetic construct
QCLKDKQAL

SEQ ID NO: 14666 - protein, 8 aa, synthetic construct
VEKVTQHI

SEQ ID NO: 14667 - protein, 10 aa, synthetic construct
HATLASAAVL

SEQ ID NO: 14668 - protein, 10 aa, synthetic construct
DIKKLKSVGI

SEQ ID NO: 14669 - protein, 10 aa, synthetic construct
DLKASKIGSL

SEQ ID NO: 14670 - protein, 8 aa, synthetic construct
LDKKLALA

SEQ ID NO: 14671 - protein, 10 aa, synthetic construct
VEVILHPVLF

SEQ ID NO: 14672 - protein, 9 aa, synthetic construct
IDFTKRGLL

SEQ ID NO: 14673 - protein, 9 aa, synthetic construct
VEKPVYKNL

SEQ ID NO: 14674 - protein, 9 aa, synthetic construct
DLKRRLDSI

SEQ ID NO: 14675 - protein, 9 aa, synthetic construct
DIKEVKQNI

SEQ ID NO: 14676 - protein, 9 aa, synthetic construct
HRVLKDEFL

SEQ ID NO: 14677 - protein, 9 aa, synthetic construct
FKAKGTIDL

SEQ ID NO: 14678 - protein, 9 aa, synthetic construct
DKIIKISVI

SEQ ID NO: 14679 - protein, 10 aa, synthetic construct
DLKLSGVLTV

SEQ ID NO: 14680 - protein, 9 aa, synthetic construct
STFLKDLVL

SEQ ID NO: 14681 - protein, 9 aa, synthetic construct
LEVEKSPHL

SEQ ID NO: 14682 - protein, 9 aa, synthetic construct
VELLLRHGA

SEQ ID NO: 14683 - protein, 12 aa, synthetic construct
VEIKGKGTKMKI

SEQ ID NO: 14684 - protein, 8 aa, synthetic construct
DLLLLHFL

SEQ ID NO: 14685 - protein, 8 aa, synthetic construct
DLIKHQTL

SEQ ID NO: 14686 - protein, 9 aa, synthetic construct
DLRIGKVAI

SEQ ID NO: 14687 - protein, 9 aa, synthetic construct
DLRRLVLLV

SEQ ID NO: 14688 - protein, 9 aa, synthetic construct
LDITRAISV

SEQ ID NO: 14689 - protein, 8 aa, synthetic construct
EVLKTHRL

SEQ ID NO: 14690 - protein, 10 aa, synthetic construct
VEMAEAPASV

SEQ ID NO: 14691 - protein, 9 aa, synthetic construct
DLMSNPVPM

SEQ ID NO: 14692 - protein, 8 aa, synthetic construct
VEMFLPHM

SEQ ID NO: 14693 - protein, 9 aa, synthetic construct
DLMAHMSSK

SEQ ID NO: 14694 - protein, 9 aa, synthetic construct
DLNRLVTQA

SEQ ID NO: 14695 - protein, 9 aa, synthetic construct
DLNKWQALL

SEQ ID NO: 14696 - protein, 8 aa, synthetic construct
DLYLWLSY

SEQ ID NO: 14697 - protein, 8 aa, synthetic construct
IDEPHAIV

SEQ ID NO: 14698 - protein, 10 aa, synthetic construct
EVPAAARGCP

SEQ ID NO: 14699 - protein, 9 aa, synthetic construct
DALFELSGF

SEQ ID NO: 14700 - protein, 9 aa, synthetic construct
VEQATLRIS

SEQ ID NO: 14701 - protein, 11 aa, synthetic construct
DLGAPLRRNSS

SEQ ID NO: 14702 - protein, 10 aa, synthetic construct
VEQHLRLSFG

SEQ ID NO: 14703 - protein, 10 aa, synthetic construct
DIKRGLALAL

SEQ ID NO: 14704 - protein, 9 aa, synthetic construct
DIRAKEKEL

SEQ ID NO: 14705 - protein, 10 aa, synthetic construct
KSVVRALFIR

SEQ ID NO: 14706 - protein, 9 aa, synthetic construct
DLLRSGKSI

SEQ ID NO: 14707 - protein, 8 aa, synthetic construct
SLRKTDLF

SEQ ID NO: 14708 - protein, 9 aa, synthetic construct
DTRLKVTSL

SEQ ID NO: 14709 - protein, 10 aa, synthetic construct
ELTLASKREL

SEQ ID NO: 14710 - protein, 9 aa, synthetic construct
LRDTKGFSL

SEQ ID NO: 14711 - protein, 9 aa, synthetic construct
DIHPLNKSL

SEQ ID NO: 14712 - protein, 8 aa, synthetic construct
DRLRVTVL

SEQ ID NO: 14713 - protein, 8 aa, synthetic construct
DIRVGKII

SEQ ID NO: 14714 - protein, 9 aa, synthetic construct
DISKLPISY

SEQ ID NO: 14715 - protein, 8 aa, synthetic construct
DLLSHSAK

SEQ ID NO: 14716 - protein, 8 aa, synthetic construct
HLDSSLAK

SEQ ID NO: 14717 - protein, 10 aa, synthetic construct
VFPNSDPVMF

SEQ ID NO: 14718 - protein, 8 aa, synthetic construct
DLVKLKYL

SEQ ID NO: 14719 - protein, 9 aa, synthetic construct
DLVSATKTQ

SEQ ID NO: 14720 - protein, 8 aa, synthetic construct
DLFRMALP

SEQ ID NO: 14721 - protein, 10 aa, synthetic construct
VEVEAPNLRT

SEQ ID NO: 14722 - protein, 9 aa, synthetic construct
DLVVKGSLL

SEQ ID NO: 14723 - protein, 10 aa, synthetic construct
REEIMATLLD

SEQ ID NO: 14724 - protein, 8 aa, synthetic construct
YFKRLLDL

SEQ ID NO: 14725 - protein, 10 aa, synthetic construct
DIYSMMVLTL

SEQ ID NO: 14726 - protein, 9 aa, synthetic construct
LDMAPDTLQ

SEQ ID NO: 14727 - protein, 9 aa, synthetic construct
LDMPTQELG

SEQ ID NO: 14728 - protein, 9 aa, synthetic construct
EMVGIIYKP

SEQ ID NO: 14729 - protein, 9 aa, synthetic construct
DTPSLLSIS

SEQ ID NO: 14730 - protein, 9 aa, synthetic construct
FQPSELIKY

SEQ ID NO: 14731 - protein, 10 aa, synthetic construct
DMSTYANECT

SEQ ID NO: 14732 - protein, 10 aa, synthetic construct
DMETEPSHMD

SEQ ID NO: 14733 - protein, 10 aa, synthetic construct
LTAVEETCGF

SEQ ID NO: 14734 - protein, 8 aa, synthetic construct
LTDMRLLL

SEQ ID NO: 14735 - protein, 9 aa, synthetic construct
EPDGTEEAD

SEQ ID NO: 14736 - protein, 11 aa, synthetic construct
DPAPASPSPGF

SEQ ID NO: 14737 - protein, 10 aa, synthetic construct
DPEGDIPVLL

SEQ ID NO: 14738 - protein, 9 aa, synthetic construct
ASEPGYVNY

SEQ ID NO: 14739 - protein, 9 aa, synthetic construct
WSLWGANYM

SEQ ID NO: 14740 - protein, 10 aa, synthetic construct
DLKNTSGLLY

SEQ ID NO: 14741 - protein, 8 aa, synthetic construct
DMLRQQRM

SEQ ID NO: 14742 - protein, 14 aa, synthetic construct
GTSGGLPGQEGQAP

SEQ ID NO: 14743 - protein, 9 aa, synthetic construct
LQCGYSVVF

SEQ ID NO: 14744 - protein, 10 aa, synthetic construct
DQSSGRLHLS

SEQ ID NO: 14745 - protein, 9 aa, synthetic construct
INGFSPEMF

SEQ ID NO: 14746 - protein, 11 aa, synthetic construct
MMAQAGSLEWM

SEQ ID NO: 14747 - protein, 9 aa, synthetic construct
ILMADSEAL

SEQ ID NO: 14748 - protein, 11 aa, synthetic construct
GGTGSVGLDRY

SEQ ID NO: 14749 - protein, 10 aa, synthetic construct
QTFLQALDYF

SEQ ID NO: 14750 - protein, 8 aa, synthetic construct
DPFKDDPF

SEQ ID NO: 14751 - protein, 9 aa, synthetic construct
LSGVPDAVF

SEQ ID NO: 14752 - protein, 10 aa, synthetic construct
DPKLPDDTTF

SEQ ID NO: 14753 - protein, 10 aa, synthetic construct
AMPQVAPDLY

SEQ ID NO: 14754 - protein, 12 aa, synthetic construct
QSPAGKEIDFSL

SEQ ID NO: 14755 - protein, 9 aa, synthetic construct
FLLSEPVAL

SEQ ID NO: 14756 - protein, 9 aa, synthetic construct
DPEVAALYF

SEQ ID NO: 14757 - protein, 10 aa, synthetic construct
GGQEGYKVSF

SEQ ID NO: 14758 - protein, 9 aa, synthetic construct
DPLVPDVSY

SEQ ID NO: 14759 - protein, 9 aa, synthetic construct
QTLQGDLTL

SEQ ID NO: 14760 - protein, 9 aa, synthetic construct
DPLPEPPLA

SEQ ID NO: 14761 - protein, 9 aa, synthetic construct
HTSGWKVVY

SEQ ID NO: 14762 - protein, 8 aa, synthetic construct
IDRKPYPD

SEQ ID NO: 14763 - protein, 9 aa, synthetic construct
YDPNFYDET

SEQ ID NO: 14764 - protein, 10 aa, synthetic construct
SSVMPVDVAM

SEQ ID NO: 14765 - protein, 11 aa, synthetic construct
TGEVSNGAVAM

SEQ ID NO: 14766 - protein, 9 aa, synthetic construct
DPNTYHYVV

SEQ ID NO: 14767 - protein, 12 aa, synthetic construct
PDPAAAPPGTGV

SEQ ID NO: 14768 - protein, 9 aa, synthetic construct
QSTVLPGPP

SEQ ID NO: 14769 - protein, 9 aa, synthetic construct
VISALDPGP

SEQ ID NO: 14770 - protein, 8 aa, synthetic construct
PDTNASLY

SEQ ID NO: 14771 - protein, 10 aa, synthetic construct
DPTSLSPAVR

SEQ ID NO: 14772 - protein, 9 aa, synthetic construct
LAAEPDVSF

SEQ ID NO: 14773 - protein, 8 aa, synthetic construct
DFKDPVYP

SEQ ID NO: 14774 - protein, 9 aa, synthetic construct
QLSKNDVPI

SEQ ID NO: 14775 - protein, 9 aa, synthetic construct
WKCPGAPFP

SEQ ID NO: 14776 - protein, 10 aa, synthetic construct
DPVSQLASAG

SEQ ID NO: 14777 - protein, 9 aa, synthetic construct
SAQDMILVL

SEQ ID NO: 14778 - protein, 9 aa, synthetic construct
DPLKVPPPL

SEQ ID NO: 14779 - protein, 9 aa, synthetic construct
DMPKNIVVI

SEQ ID NO: 14780 - protein, 10 aa, synthetic construct
SPGSLQYMFN

SEQ ID NO: 14781 - protein, 8 aa, synthetic construct
NEFRRRLS

SEQ ID NO: 14782 - protein, 12 aa, synthetic construct
GLFSVHPSTGVI

SEQ ID NO: 14783 - protein, 10 aa, synthetic construct
GELGLSLPYG

SEQ ID NO: 14784 - protein, 9 aa, synthetic construct
IIDDQLPVD

SEQ ID NO: 14785 - protein, 11 aa, synthetic construct
GEGLCSVAASV

SEQ ID NO: 14786 - protein, 9 aa, synthetic construct
IVERLRARI

SEQ ID NO: 14787 - protein, 7 aa, synthetic construct
NTDHILY

SEQ ID NO: 14788 - protein, 9 aa, synthetic construct
EEYAYGSYY

SEQ ID NO: 14789 - protein, 10 aa, synthetic construct
SQDTFTMDPS

SEQ ID NO: 14790 - protein, 8 aa, synthetic construct
DSEVQRLD

SEQ ID NO: 14791 - protein, 9 aa, synthetic construct
SDDLARNGI

SEQ ID NO: 14792 - protein, 9 aa, synthetic construct
DSDRTSEVY

SEQ ID NO: 14793 - protein, 13 aa, synthetic construct
PSGSSNGAGESGG

SEQ ID NO: 14794 - protein, 9 aa, synthetic construct
YSYDAPSDF

SEQ ID NO: 14795 - protein, 9 aa, synthetic construct
STQDDVDLY

SEQ ID NO: 14796 - protein, 10 aa, synthetic construct
AQGGCSAIVY

SEQ ID NO: 14797 - protein, 10 aa, synthetic construct
AQMACSGTVY

SEQ ID NO: 14798 - protein, 8 aa, synthetic construct
KDSEDSLY

SEQ ID NO: 14799 - protein, 12 aa, synthetic construct
FGHPVSPETPMS

SEQ ID NO: 14800 - protein, 9 aa, synthetic construct
VGEYLSISF

SEQ ID NO: 14801 - protein, 10 aa, synthetic construct
STVNQALVPY

SEQ ID NO: 14802 - protein, 8 aa, synthetic construct
DSIIKESL

SEQ ID NO: 14803 - protein, 8 aa, synthetic construct
EVSPLPCH

SEQ ID NO: 14804 - protein, 8 aa, synthetic construct
DSKIKKIV

SEQ ID NO: 14805 - protein, 8 aa, synthetic construct
LSLDKATI

SEQ ID NO: 14806 - protein, 10 aa, synthetic construct
ESVLKKLSKD

SEQ ID NO: 14807 - protein, 10 aa, synthetic construct
LSDRSLKTKV

SEQ ID NO: 14808 - protein, 11 aa, synthetic construct
SDLALFIAAII

SEQ ID NO: 14809 - protein, 9 aa, synthetic construct
DSIIKRKRM

SEQ ID NO: 14810 - protein, 10 aa, synthetic construct
LDLSENGLSL

SEQ ID NO: 14811 - protein, 9 aa, synthetic construct
LLADGSNVY

SEQ ID NO: 14812 - protein, 9 aa, synthetic construct
FLSSCSSVY

SEQ ID NO: 14813 - protein, 8 aa, synthetic construct
IRHSDVCI

SEQ ID NO: 14814 - protein, 8 aa, synthetic construct
MVKAYVCL

SEQ ID NO: 14815 - protein, 8 aa, synthetic construct
FNYALVIF

SEQ ID NO: 14816 - protein, 10 aa, synthetic construct
SLLEKMTSSD

SEQ ID NO: 14817 - protein, 11 aa, synthetic construct
DSSLAMSVSVV

SEQ ID NO: 14818 - protein, 9 aa, synthetic construct
ATEPSSTPF

SEQ ID NO: 14819 - protein, 9 aa, synthetic construct
DSSYFKIFK

SEQ ID NO: 14820 - protein, 11 aa, synthetic construct
WSPDFQAPPSV

SEQ ID NO: 14821 - protein, 8 aa, synthetic construct
QTEIFILF

SEQ ID NO: 14822 - protein, 8 aa, synthetic construct
TDHGLRVL

SEQ ID NO: 14823 - protein, 10 aa, synthetic construct
GAFLCPALVY

SEQ ID NO: 14824 - protein, 9 aa, synthetic construct
ENCGVYIYK

SEQ ID NO: 14825 - protein, 11 aa, synthetic construct
QSAMFLAVQHD

SEQ ID NO: 14826 - protein, 9 aa, synthetic construct
YLRNLCLTD

SEQ ID NO: 14827 - protein, 10 aa, synthetic construct
MDSTEAQLRY

SEQ ID NO: 14828 - protein, 10 aa, synthetic construct
DDGEVAFWKY

SEQ ID NO: 14829 - protein, 10 aa, synthetic construct
SGCKGTDIMY

SEQ ID NO: 14830 - protein, 8 aa, synthetic construct
RKEELSKL

SEQ ID NO: 14831 - protein, 11 aa, synthetic construct
RGSTISLMRTD

SEQ ID NO: 14832 - protein, 10 aa, synthetic construct
TEVYEGALLY

SEQ ID NO: 14833 - protein, 11 aa, synthetic construct
DTLGQAQQRVV

SEQ ID NO: 14834 - protein, 9 aa, synthetic construct
DTIKVKMQT

SEQ ID NO: 14835 - protein, 10 aa, synthetic construct
SELVSTACGF

SEQ ID NO: 14836 - protein, 9 aa, synthetic construct
DTLTMVMEF

SEQ ID NO: 14837 - protein, 9 aa, synthetic construct
TLDSPGLTF

SEQ ID NO: 14838 - protein, 9 aa, synthetic construct
SELSDMKIM

SEQ ID NO: 14839 - protein, 9 aa, synthetic construct
VDYMSITSF

SEQ ID NO: 14840 - protein, 10 aa, synthetic construct
LLLAADAVQY

SEQ ID NO: 14841 - protein, 9 aa, synthetic construct
LTIHGDLYY

SEQ ID NO: 14842 - protein, 12 aa, synthetic construct
DQTGLSGGVASF

SEQ ID NO: 14843 - protein, 11 aa, synthetic construct
LSSQDVGQASF

SEQ ID NO: 14844 - protein, 10 aa, synthetic construct
GEQNKSEISF

SEQ ID NO: 14845 - protein, 10 aa, synthetic construct
DNKKDDGISF

SEQ ID NO: 14846 - protein, 11 aa, synthetic construct
LQASESGGRSF

SEQ ID NO: 14847 - protein, 10 aa, synthetic construct
PPGRLSMMSF

SEQ ID NO: 14848 - protein, 9 aa, synthetic construct
EDTQLWISF

SEQ ID NO: 14849 - protein, 10 aa, synthetic construct
QPPFGPDFYS

SEQ ID NO: 14850 - protein, 9 aa, synthetic construct
MSEKKCCEF

SEQ ID NO: 14851 - protein, 8 aa, synthetic construct
DFTKRGLL

SEQ ID NO: 14852 - protein, 12 aa, synthetic construct
TSEATGPPTSMY

SEQ ID NO: 14853 - protein, 9 aa, synthetic construct
HPTQCPLLF

SEQ ID NO: 14854 - protein, 10 aa, synthetic construct
LSSGQMVMLF

SEQ ID NO: 14855 - protein, 9 aa, synthetic construct
SQLDLVSGF

SEQ ID NO: 14856 - protein, 9 aa, synthetic construct
DRKSDRPVY

SEQ ID NO: 14857 - protein, 11 aa, synthetic construct
NPGTTSGNTAT

SEQ ID NO: 14858 - protein, 9 aa, synthetic construct
DTLVQHQKI

SEQ ID NO: 14859 - protein, 8 aa, synthetic construct
DVAQLEYK

SEQ ID NO: 14860 - protein, 10 aa, synthetic construct
PPLRRAGAAP

SEQ ID NO: 14861 - protein, 11 aa, synthetic construct
VEAGCLPGAPA

SEQ ID NO: 14862 - protein, 9 aa, synthetic construct
NLAEELNGY

SEQ ID NO: 14863 - protein, 10 aa, synthetic construct
DVASEVYHGP

SEQ ID NO: 14864 - protein, 10 aa, synthetic construct
VDAEFKELMF

SEQ ID NO: 14865 - protein, 11 aa, synthetic construct
VDAETMHTLLD

SEQ ID NO: 14866 - protein, 9 aa, synthetic construct
AVGADLLDY

SEQ ID NO: 14867 - protein, 9 aa, synthetic construct
DVANKVLAI

SEQ ID NO: 14868 - protein, 11 aa, synthetic construct
TPGLLDSIYPS

SEQ ID NO: 14869 - protein, 8 aa, synthetic construct
VDRIYSLY

SEQ ID NO: 14870 - protein, 13 aa, synthetic construct
DVAAPGVPPRVGA

SEQ ID NO: 14871 - protein, 9 aa, synthetic construct
KLLEKNDVY

SEQ ID NO: 14872 - protein, 9 aa, synthetic construct
KGGLDEALY

SEQ ID NO: 14873 - protein, 11 aa, synthetic construct
MSTHSLCGGLY

SEQ ID NO: 14874 - protein, 11 aa, synthetic construct
VDCSKASSNML

SEQ ID NO: 14875 - protein, 8 aa, synthetic construct
EHSRMLSY

SEQ ID NO: 14876 - protein, 9 aa, synthetic construct
LFGLDFLTM

SEQ ID NO: 14877 - protein, 9 aa, synthetic construct
APTCYLQSY

SEQ ID NO: 14878 - protein, 10 aa, synthetic construct
MFTSVAYGNF

SEQ ID NO: 14879 - protein, 11 aa, synthetic construct
DVKTCARDSGY

SEQ ID NO: 14880 - protein, 11 aa, synthetic construct
CHVSPDGQTVY

SEQ ID NO: 14881 - protein, 11 aa, synthetic construct
SQLSAMQINSY

SEQ ID NO: 14882 - protein, 9 aa, synthetic construct
PNHLYNLVD

SEQ ID NO: 14883 - protein, 10 aa, synthetic construct
AETFLLFTGD

SEQ ID NO: 14884 - protein, 9 aa, synthetic construct
EYTLMSIDT

SEQ ID NO: 14885 - protein, 9 aa, synthetic construct
YIGDIVSLY

SEQ ID NO: 14886 - protein, 9 aa, synthetic construct
MSLHLNSIY

SEQ ID NO: 14887 - protein, 12 aa, synthetic construct
HTSVSAPSTPSP

SEQ ID NO: 14888 - protein, 9 aa, synthetic construct
DVIALNQKL

SEQ ID NO: 14889 - protein, 10 aa, synthetic construct
VDLRGAALAH

SEQ ID NO: 14890 - protein, 10 aa, synthetic construct
DVINSIEIVS

SEQ ID NO: 14891 - protein, 9 aa, synthetic construct
VLKQNELQY

SEQ ID NO: 14892 - protein, 9 aa, synthetic construct
LMSSLLMCY

SEQ ID NO: 14893 - protein, 8 aa, synthetic construct
DVLQFCDF

SEQ ID NO: 14894 - protein, 9 aa, synthetic construct
DVQAVLAKY

SEQ ID NO: 14895 - protein, 9 aa, synthetic construct
IEGVSLSGF

SEQ ID NO: 14896 - protein, 9 aa, synthetic construct
VDLNGQDRR

SEQ ID NO: 14897 - protein, 10 aa, synthetic construct
VDIQASYGAV

SEQ ID NO: 14898 - protein, 9 aa, synthetic construct
DVLVSWRHQ

SEQ ID NO: 14899 - protein, 9 aa, synthetic construct
LRDLVLQGH

SEQ ID NO: 14900 - protein, 10 aa, synthetic construct
RVLVLEMFSG

SEQ ID NO: 14901 - protein, 9 aa, synthetic construct
EVSDLLSAL

SEQ ID NO: 14902 - protein, 10 aa, synthetic construct
DSLLAIDARM

SEQ ID NO: 14903 - protein, 10 aa, synthetic construct
VDISMLKTGS

SEQ ID NO: 14904 - protein, 9 aa, synthetic construct
FFCISDLAN

SEQ ID NO: 14905 - protein, 13 aa, synthetic construct
EVVTAGGAALPPP

SEQ ID NO: 14906 - protein, 9 aa, synthetic construct
DVKKAELHL

SEQ ID NO: 14907 - protein, 10 aa, synthetic construct
ATEVAVIGFF

SEQ ID NO: 14908 - protein, 9 aa, synthetic construct
DVQELLTQY

SEQ ID NO: 14909 - protein, 10 aa, synthetic construct
VDKLDALESL

SEQ ID NO: 14910 - protein, 10 aa, synthetic construct
ISEINTVDVL

SEQ ID NO: 14911 - protein, 10 aa, synthetic construct
STFLLNGQEY

SEQ ID NO: 14912 - protein, 11 aa, synthetic construct
MSPHSLASRAP

SEQ ID NO: 14913 - protein, 10 aa, synthetic construct
DVEIKKFLAG

SEQ ID NO: 14914 - protein, 10 aa, synthetic construct
SSPSILLEPF

SEQ ID NO: 14915 - protein, 9 aa, synthetic construct
VNKDTLTQY

SEQ ID NO: 14916 - protein, 9 aa, synthetic construct
DVLHRPELL

SEQ ID NO: 14917 - protein, 11 aa, synthetic construct
FALTAALVKVD

SEQ ID NO: 14918 - protein, 9 aa, synthetic construct
KDKFPVSRQ

SEQ ID NO: 14919 - protein, 8 aa, synthetic construct
QTFQHWLY

SEQ ID NO: 14920 - protein, 10 aa, synthetic construct
LAEEFGVTEY

SEQ ID NO: 14921 - protein, 9 aa, synthetic construct
IVDTVDNLL

SEQ ID NO: 14922 - protein, 9 aa, synthetic construct
VDLLESFLA

SEQ ID NO: 14923 - protein, 12 aa, synthetic construct
LSTAHVFPAPGT

SEQ ID NO: 14924 - protein, 9 aa, synthetic construct
ATLEGKVAS

SEQ ID NO: 14925 - protein, 10 aa, synthetic construct
APSDFINFSS

SEQ ID NO: 14926 - protein, 10 aa, synthetic construct
AQPINCPDEL

SEQ ID NO: 14927 - protein, 8 aa, synthetic construct
ATAESRAL

SEQ ID NO: 14928 - protein, 9 aa, synthetic construct
FDVPDGILD

SEQ ID NO: 14929 - protein, 10 aa, synthetic construct
VVDPDEKSIM

SEQ ID NO: 14930 - protein, 9 aa, synthetic construct
PWWVDVISM

SEQ ID NO: 14931 - protein, 9 aa, synthetic construct
DVEPFLFYV

SEQ ID NO: 14932 - protein, 9 aa, synthetic construct
VDIAQSELF

SEQ ID NO: 14933 - protein, 9 aa, synthetic construct
DVLERNQVF

SEQ ID NO: 14934 - protein, 10 aa, synthetic construct
KLDTNITEVD

SEQ ID NO: 14935 - protein, 7 aa, synthetic construct
DVQMLLR

SEQ ID NO: 14936 - protein, 11 aa, synthetic construct
VDPAVMGGFAN

SEQ ID NO: 14937 - protein, 9 aa, synthetic construct
FNHFGCYPA

SEQ ID NO: 14938 - protein, 9 aa, synthetic construct
LDVPTFVSF

SEQ ID NO: 14939 - protein, 9 aa, synthetic construct
RAEIKLRLD

SEQ ID NO: 14940 - protein, 9 aa, synthetic construct
TPTTPVTSY

SEQ ID NO: 14941 - protein, 9 aa, synthetic construct
FVVTESFLL

SEQ ID NO: 14942 - protein, 10 aa, synthetic construct
EGPRLPEEAP

SEQ ID NO: 14943 - protein, 10 aa, synthetic construct
APSISSSSAY

SEQ ID NO: 14944 - protein, 9 aa, synthetic construct
LSDVTLTLY

SEQ ID NO: 14945 - protein, 11 aa, synthetic construct
DVVQGERGTEA

SEQ ID NO: 14946 - protein, 9 aa, synthetic construct
DVDLVLRKS

SEQ ID NO: 14947 - protein, 11 aa, synthetic construct
AMLPGMDLQYV

SEQ ID NO: 14948 - protein, 9 aa, synthetic construct
DVEKIVNLF

SEQ ID NO: 14949 - protein, 11 aa, synthetic construct
VAPTLLGLGSQ

SEQ ID NO: 14950 - protein, 9 aa, synthetic construct
TNELESYGY

SEQ ID NO: 14951 - protein, 9 aa, synthetic construct
QPPGAAKPA

SEQ ID NO: 14952 - protein, 7 aa, synthetic construct
VDVTQFK

SEQ ID NO: 14953 - protein, 7 aa, synthetic construct
DVSKLMK

SEQ ID NO: 14954 - protein, 8 aa, synthetic construct
QATIHVPA

SEQ ID NO: 14955 - protein, 10 aa, synthetic construct
VDVLDVPGPV

SEQ ID NO: 14956 - protein, 9 aa, synthetic construct
DVKVLRLIS

SEQ ID NO: 14957 - protein, 9 aa, synthetic construct
ALEEQLLKY

SEQ ID NO: 14958 - protein, 9 aa, synthetic construct
DIIRAVGAY

SEQ ID NO: 14959 - protein, 11 aa, synthetic construct
DVVSAIRAGGD

SEQ ID NO: 14960 - protein, 10 aa, synthetic construct
VDFFAIEMLD

SEQ ID NO: 14961 - protein, 11 aa, synthetic construct
DVKMSLSSMEV

SEQ ID NO: 14962 - protein, 9 aa, synthetic construct
VDYHIDPAD

SEQ ID NO: 14963 - protein, 10 aa, synthetic construct
DVYSQKSAMY

SEQ ID NO: 14964 - protein, 11 aa, synthetic construct
VDSAATACLIY

SEQ ID NO: 14965 - protein, 11 aa, synthetic construct
TARTLHFQSGS

SEQ ID NO: 14966 - protein, 11 aa, synthetic construct
LTERSPSGSAF

SEQ ID NO: 14967 - protein, 9 aa, synthetic construct
DLTLLVKEM

SEQ ID NO: 14968 - protein, 10 aa, synthetic construct
FYDESGVRRS

SEQ ID NO: 14969 - protein, 10 aa, synthetic construct
DLYSGYNDYN

SEQ ID NO: 14970 - protein, 8 aa, synthetic construct
DYNKCWEL

SEQ ID NO: 14971 - protein, 9 aa, synthetic construct
IDYIDTIWK

SEQ ID NO: 14972 - protein, 9 aa, synthetic construct
NGKKNNFLF

SEQ ID NO: 14973 - protein, 9 aa, synthetic construct
YDQATSLRI

SEQ ID NO: 14974 - protein, 9 aa, synthetic construct
MSFVNLVEY

SEQ ID NO: 14975 - protein, 9 aa, synthetic construct
LMDASKLSL

SEQ ID NO: 14976 - protein, 9 aa, synthetic construct
DMEESCKYN

SEQ ID NO: 14977 - protein, 10 aa, synthetic construct
EFSSMDTFED

SEQ ID NO: 14978 - protein, 10 aa, synthetic construct
AYQSTDGLGY

SEQ ID NO: 14979 - protein, 10 aa, synthetic construct
NWAPATCWAL

SEQ ID NO: 14980 - protein, 9 aa, synthetic construct
DMIIKADRF

SEQ ID NO: 14981 - protein, 9 aa, synthetic construct
GLCRLCCGF

SEQ ID NO: 14982 - protein, 10 aa, synthetic construct
DMYLKLQEAL

SEQ ID NO: 14983 - protein, 9 aa, synthetic construct
FLERNIMVI

SEQ ID NO: 14984 - protein, 10 aa, synthetic construct
DMGQPGSLKF

SEQ ID NO: 14985 - protein, 9 aa, synthetic construct
YMKSKEFFF

SEQ ID NO: 14986 - protein, 8 aa, synthetic construct
IMDRILQI

SEQ ID NO: 14987 - protein, 8 aa, synthetic construct
DMLIERIL

SEQ ID NO: 14988 - protein, 9 aa, synthetic construct
DMNPLATPL

SEQ ID NO: 14989 - protein, 9 aa, synthetic construct
ALGVDIVNY

SEQ ID NO: 14990 - protein, 8 aa, synthetic construct
VQDGMGLY

SEQ ID NO: 14991 - protein, 8 aa, synthetic construct
MPRDSGIY

SEQ ID NO: 14992 - protein, 8 aa, synthetic construct
EDINFLGF

SEQ ID NO: 14993 - protein, 9 aa, synthetic construct
AELEPSSLY

SEQ ID NO: 14994 - protein, 11 aa, synthetic construct
QVVSRPSASVA

SEQ ID NO: 14995 - protein, 9 aa, synthetic construct
YNGMDLSVN

SEQ ID NO: 14996 - protein, 9 aa, synthetic construct
AEAPAPEVY

SEQ ID NO: 14997 - protein, 9 aa, synthetic construct
SQPSLLSTF

SEQ ID NO: 14998 - protein, 9 aa, synthetic construct
ALGWLLDQY

SEQ ID NO: 14999 - protein, 10 aa, synthetic construct
LLQGEEYDFS

SEQ ID NO: 15000 - protein, 9 aa, synthetic construct
LPEVSKEMY

SEQ ID NO: 15001 - protein, 9 aa, synthetic construct
LTEQLDTYI

SEQ ID NO: 15002 - protein, 9 aa, synthetic construct
PTATSPVVY

SEQ ID NO: 15003 - protein, 8 aa, synthetic construct
QEIALKMA

SEQ ID NO: 15004 - protein, 9 aa, synthetic construct
LEEACDMAL

SEQ ID NO: 15005 - protein, 9 aa, synthetic construct
VAAGDQMLY

SEQ ID NO: 15006 - protein, 8 aa, synthetic construct
EQCVIVIE

SEQ ID NO: 15007 - protein, 9 aa, synthetic construct
AEIICAIEY

SEQ ID NO: 15008 - protein, 9 aa, synthetic construct
YIHKYVQSQ

SEQ ID NO: 15009 - protein, 8 aa, synthetic construct
ELENQLEY

SEQ ID NO: 15010 - protein, 11 aa, synthetic construct
EEAAAAPISPW

SEQ ID NO: 15011 - protein, 10 aa, synthetic construct
RSSSLWGWEY

SEQ ID NO: 15012 - protein, 9 aa, synthetic construct
LIEPEEAYI

SEQ ID NO: 15013 - protein, 9 aa, synthetic construct
EKYGSFEEA

SEQ ID NO: 15014 - protein, 9 aa, synthetic construct
EGSPYVVLF

SEQ ID NO: 15015 - protein, 10 aa, synthetic construct
MGELARKEAE

SEQ ID NO: 15016 - protein, 8 aa, synthetic construct
FEINGLDF

SEQ ID NO: 15017 - protein, 10 aa, synthetic construct
SLEPDDTSFS

SEQ ID NO: 15018 - protein, 10 aa, synthetic construct
FGKVVEGTAY

SEQ ID NO: 15019 - protein, 11 aa, synthetic construct
EFESNSLGYIY

SEQ ID NO: 15020 - protein, 11 aa, synthetic construct
VYVTSPLVNNF

SEQ ID NO: 15021 - protein, 9 aa, synthetic construct
FVDVVNGEY

SEQ ID NO: 15022 - protein, 8 aa, synthetic construct
EALFKHIL

SEQ ID NO: 15023 - protein, 9 aa, synthetic construct
KLADMNQEY

SEQ ID NO: 15024 - protein, 10 aa, synthetic construct
ASASKAAEFF

SEQ ID NO: 15025 - protein, 8 aa, synthetic construct
VEALFFPS

SEQ ID NO: 15026 - protein, 8 aa, synthetic construct
MVTQFKEK

SEQ ID NO: 15027 - protein, 12 aa, synthetic construct
EAFSVTGPAAPG

SEQ ID NO: 15028 - protein, 11 aa, synthetic construct
FGDVFSEQDGV

SEQ ID NO: 15029 - protein, 11 aa, synthetic construct
RMGSMGGMEPH

SEQ ID NO: 15030 - protein, 8 aa, synthetic construct
LAFDRHLL

SEQ ID NO: 15031 - protein, 9 aa, synthetic construct
EAFKMAQSL

SEQ ID NO: 15032 - protein, 11 aa, synthetic construct
EALSEGGNLSS

SEQ ID NO: 15033 - protein, 8 aa, synthetic construct
EAHLCRQA

SEQ ID NO: 15034 - protein, 9 aa, synthetic construct
EAHNDKGLT

SEQ ID NO: 15035 - protein, 9 aa, synthetic construct
EAHAELDSL

SEQ ID NO: 15036 - protein, 9 aa, synthetic construct
ELAALTVYQ

SEQ ID NO: 15037 - protein, 12 aa, synthetic construct
TPRVSPAHSPPE

SEQ ID NO: 15038 - protein, 11 aa, synthetic construct
QALDLQTPSFQ

SEQ ID NO: 15039 - protein, 9 aa, synthetic construct
SEGELPVFS

SEQ ID NO: 15040 - protein, 10 aa, synthetic construct
EETVEAAIHP

SEQ ID NO: 15041 - protein, 10 aa, synthetic construct
FYSLTSSNIS

SEQ ID NO: 15042 - protein, 9 aa, synthetic construct
AAEAVVLHY

SEQ ID NO: 15043 - protein, 9 aa, synthetic construct
EALGILQSF

SEQ ID NO: 15044 - protein, 9 aa, synthetic construct
EALLGTTIM

SEQ ID NO: 15045 - protein, 11 aa, synthetic construct
VDVKLPEGPLP

SEQ ID NO: 15046 - protein, 11 aa, synthetic construct
LQLASAAGNYE

SEQ ID NO: 15047 - protein, 9 aa, synthetic construct
ELLINSPTF

SEQ ID NO: 15048 - protein, 10 aa, synthetic construct
AELSYLVDRP

SEQ ID NO: 15049 - protein, 9 aa, synthetic construct
DMVILASYK

SEQ ID NO: 15050 - protein, 10 aa, synthetic construct
EALTTAHLEA

SEQ ID NO: 15051 - protein, 9 aa, synthetic construct
ETLAAVFSG

SEQ ID NO: 15052 - protein, 8 aa, synthetic construct
LPTTTVMI

SEQ ID NO: 15053 - protein, 8 aa, synthetic construct
LTTPTVPY

SEQ ID NO: 15054 - protein, 8 aa, synthetic construct
EALKEKYL

SEQ ID NO: 15055 - protein, 8 aa, synthetic construct
LQSFFETS

SEQ ID NO: 15056 - protein, 10 aa, synthetic construct
EGTSPAPQEV

SEQ ID NO: 15057 - protein, 8 aa, synthetic construct
AEALKKLI

SEQ ID NO: 15058 - protein, 12 aa, synthetic construct
TVAGGARLGAQL

SEQ ID NO: 15059 - protein, 8 aa, synthetic construct
LQLEAITY

SEQ ID NO: 15060 - protein, 9 aa, synthetic construct
AIQELLSIY

SEQ ID NO: 15061 - protein, 10 aa, synthetic construct
LEAALTQEAS

SEQ ID NO: 15062 - protein, 9 aa, synthetic construct
GLVDVLYTA

SEQ ID NO: 15063 - protein, 9 aa, synthetic construct
DVTMYSVEY

SEQ ID NO: 15064 - protein, 10 aa, synthetic construct
QVMEGGQVEY

SEQ ID NO: 15065 - protein, 9 aa, synthetic construct
VESIAETYG

SEQ ID NO: 15066 - protein, 8 aa, synthetic construct
LEAKIKLL

SEQ ID NO: 15067 - protein, 9 aa, synthetic construct
IAEAKGPSV

SEQ ID NO: 15068 - protein, 10 aa, synthetic construct
LALGAEASTF

SEQ ID NO: 15069 - protein, 10 aa, synthetic construct
DLGKNGLVSY

SEQ ID NO: 15070 - protein, 10 aa, synthetic construct
ADLTLAGSWA

SEQ ID NO: 15071 - protein, 9 aa, synthetic construct
EGLKEELAY

SEQ ID NO: 15072 - protein, 10 aa, synthetic construct
SSNRGRAEVY

SEQ ID NO: 15073 - protein, 9 aa, synthetic construct
DLMEAVTEY

SEQ ID NO: 15074 - protein, 9 aa, synthetic construct
EGQALISDL

SEQ ID NO: 15075 - protein, 9 aa, synthetic construct
LNPESEQYY

SEQ ID NO: 15076 - protein, 10 aa, synthetic construct
HPSGENSIIY

SEQ ID NO: 15077 - protein, 9 aa, synthetic construct
FENHETVAY

SEQ ID NO: 15078 - protein, 9 aa, synthetic construct
LVEVHSMEA

SEQ ID NO: 15079 - protein, 9 aa, synthetic construct
LNMSIEAEL

SEQ ID NO: 15080 - protein, 9 aa, synthetic construct
AEAAEALLS

SEQ ID NO: 15081 - protein, 10 aa, synthetic construct
AIEGAKIEQY

SEQ ID NO: 15082 - protein, 9 aa, synthetic construct
AQEFLIKEA

SEQ ID NO: 15083 - protein, 10 aa, synthetic construct
LSEAAEVYFS

SEQ ID NO: 15084 - protein, 9 aa, synthetic construct
EASLGVHTY

SEQ ID NO: 15085 - protein, 8 aa, synthetic construct
VYTHIYVY

SEQ ID NO: 15086 - protein, 9 aa, synthetic construct
LQSSLITLY

SEQ ID NO: 15087 - protein, 9 aa, synthetic construct
KRMEFMAYG

SEQ ID NO: 15088 - protein, 12 aa, synthetic construct
QEQIANSAPVGE

SEQ ID NO: 15089 - protein, 9 aa, synthetic construct
ADLTIPVAM

SEQ ID NO: 15090 - protein, 9 aa, synthetic construct
AELSPSMAP

SEQ ID NO: 15091 - protein, 9 aa, synthetic construct
AEAPPSPLP

SEQ ID NO: 15092 - protein, 8 aa, synthetic construct
LEKEIETY

SEQ ID NO: 15093 - protein, 9 aa, synthetic construct
AETGLELLL

SEQ ID NO: 15094 - protein, 8 aa, synthetic construct
NSRCLIYC

SEQ ID NO: 15095 - protein, 10 aa, synthetic construct
AEIPGRGCFL

SEQ ID NO: 15096 - protein, 9 aa, synthetic construct
LTDLFSTVF

SEQ ID NO: 15097 - protein, 10 aa, synthetic construct
EGTVGRSPGP

SEQ ID NO: 15098 - protein, 8 aa, synthetic construct
AKRCTLVF

SEQ ID NO: 15099 - protein, 10 aa, synthetic construct
LEAQAATGYV

SEQ ID NO: 15100 - protein, 10 aa, synthetic construct
DLAGWDLTDY

SEQ ID NO: 15101 - protein, 9 aa, synthetic construct
EVAVEDISY

SEQ ID NO: 15102 - protein, 9 aa, synthetic construct
SPTENTVFA

SEQ ID NO: 15103 - protein, 9 aa, synthetic construct
ESAVDLFSY

SEQ ID NO: 15104 - protein, 10 aa, synthetic construct
VDIGETRGGG

SEQ ID NO: 15105 - protein, 9 aa, synthetic construct
PVVNGELTM

SEQ ID NO: 15106 - protein, 9 aa, synthetic construct
STIPELINY

SEQ ID NO: 15107 - protein, 10 aa, synthetic construct
GGAPAPDDRL

SEQ ID NO: 15108 - protein, 9 aa, synthetic construct
EAVIEKHVF

SEQ ID NO: 15109 - protein, 9 aa, synthetic construct
ELGDCKISY

SEQ ID NO: 15110 - protein, 10 aa, synthetic construct
PSGSLGLSDY

SEQ ID NO: 15111 - protein, 9 aa, synthetic construct
LAQIDASMF

SEQ ID NO: 15112 - protein, 9 aa, synthetic construct
SLEGRLPEY

SEQ ID NO: 15113 - protein, 9 aa, synthetic construct
GTLEPSMIA

SEQ ID NO: 15114 - protein, 11 aa, synthetic construct
LSNGANVTGYG

SEQ ID NO: 15115 - protein, 11 aa, synthetic construct
AEAWPCHGRPG

SEQ ID NO: 15116 - protein, 11 aa, synthetic construct
TGNNFWLAQDA

SEQ ID NO: 15117 - protein, 12 aa, synthetic construct
NHASAALNGEIY

SEQ ID NO: 15118 - protein, 9 aa, synthetic construct
EAVTRAKQI

SEQ ID NO: 15119 - protein, 9 aa, synthetic construct
AEGITRKQL

SEQ ID NO: 15120 - protein, 8 aa, synthetic construct
WEAKLKQI

SEQ ID NO: 15121 - protein, 10 aa, synthetic construct
VDGQWDLSNY

SEQ ID NO: 15122 - protein, 9 aa, synthetic construct
SICWASVAA

SEQ ID NO: 15123 - protein, 10 aa, synthetic construct
DDRGGSVIKY

SEQ ID NO: 15124 - protein, 10 aa, synthetic construct
ESFLNGNLAG

SEQ ID NO: 15125 - protein, 9 aa, synthetic construct
YAEDLAPML

SEQ ID NO: 15126 - protein, 9 aa, synthetic construct
EYLAEIMFE

SEQ ID NO: 15127 - protein, 9 aa, synthetic construct
EAYNLGVRY

SEQ ID NO: 15128 - protein, 10 aa, synthetic construct
EANFPANVMD

SEQ ID NO: 15129 - protein, 9 aa, synthetic construct
QYATLGDYF

SEQ ID NO: 15130 - protein, 9 aa, synthetic construct
AEYVVEFTG

SEQ ID NO: 15131 - protein, 9 aa, synthetic construct
HCMTLSVYS

SEQ ID NO: 15132 - protein, 9 aa, synthetic construct
IMAEELVKL

SEQ ID NO: 15133 - protein, 10 aa, synthetic construct
FGDENGAIEI

SEQ ID NO: 15134 - protein, 9 aa, synthetic construct
SRWSVEEVY

SEQ ID NO: 15135 - protein, 9 aa, synthetic construct
QAAMARHLC

SEQ ID NO: 15136 - protein, 10 aa, synthetic construct
SFQPLMGSAY

SEQ ID NO: 15137 - protein, 10 aa, synthetic construct
LCTLEPSPWL

SEQ ID NO: 15138 - protein, 9 aa, synthetic construct
CPVVDQESL

SEQ ID NO: 15139 - protein, 9 aa, synthetic construct
VNMDGTALY

SEQ ID NO: 15140 - protein, 9 aa, synthetic construct
FQSDCTISY

SEQ ID NO: 15141 - protein, 9 aa, synthetic construct
ECLIKNCLV

SEQ ID NO: 15142 - protein, 10 aa, synthetic construct
NYQMLTLGGD

SEQ ID NO: 15143 - protein, 8 aa, synthetic construct
DEFDQLIK

SEQ ID NO: 15144 - protein, 8 aa, synthetic construct
ENFDELLK

SEQ ID NO: 15145 - protein, 10 aa, synthetic construct
SNGAELLYKR

SEQ ID NO: 15146 - protein, 9 aa, synthetic construct
VDDIVADLA

SEQ ID NO: 15147 - protein, 10 aa, synthetic construct
DMIDLEMADP

SEQ ID NO: 15148 - protein, 11 aa, synthetic construct
IWGVGSNSLHL

SEQ ID NO: 15149 - protein, 11 aa, synthetic construct
EEDAALAAARY

SEQ ID NO: 15150 - protein, 10 aa, synthetic construct
QFPCSISTRW

SEQ ID NO: 15151 - protein, 9 aa, synthetic construct
KSSSETPIV

SEQ ID NO: 15152 - protein, 10 aa, synthetic construct
NGKTQAEAVA

SEQ ID NO: 15153 - protein, 11 aa, synthetic construct
GEKMETEADAP

SEQ ID NO: 15154 - protein, 11 aa, synthetic construct
ASNHGLADLAK

SEQ ID NO: 15155 - protein, 8 aa, synthetic construct
ERRWAESW

SEQ ID NO: 15156 - protein, 9 aa, synthetic construct
KQDLQVLMA

SEQ ID NO: 15157 - protein, 8 aa, synthetic construct
LEEGLLSA

SEQ ID NO: 15158 - protein, 10 aa, synthetic construct
EEIDSRIRDA

SEQ ID NO: 15159 - protein, 9 aa, synthetic construct
EGLEELLSA

SEQ ID NO: 15160 - protein, 11 aa, synthetic construct
LAHLYATFATA

SEQ ID NO: 15161 - protein, 9 aa, synthetic construct
EELKELKEY

SEQ ID NO: 15162 - protein, 9 aa, synthetic construct
MWTPLPTSA

SEQ ID NO: 15163 - protein, 10 aa, synthetic construct
GAPARCTGFG

SEQ ID NO: 15164 - protein, 8 aa, synthetic construct
LEENLPIL

SEQ ID NO: 15165 - protein, 9 aa, synthetic construct
EEKLKIGLL

SEQ ID NO: 15166 - protein, 12 aa, synthetic construct
EEDIHDKFAEYG

SEQ ID NO: 15167 - protein, 9 aa, synthetic construct
EELLDSYHN

SEQ ID NO: 15168 - protein, 9 aa, synthetic construct
EELEALFLE

SEQ ID NO: 15169 - protein, 10 aa, synthetic construct
EPGGEIELVF

SEQ ID NO: 15170 - protein, 8 aa, synthetic construct
QEELQQLR

SEQ ID NO: 15171 - protein, 8 aa, synthetic construct
EEQLRQQI

SEQ ID NO: 15172 - protein, 10 aa, synthetic construct
EEQLEQQRLA

SEQ ID NO: 15173 - protein, 11 aa, synthetic construct
LAAENQELRAE

SEQ ID NO: 15174 - protein, 9 aa, synthetic construct
DSDLEDVLQ

SEQ ID NO: 15175 - protein, 9 aa, synthetic construct
ASDMTTELE

SEQ ID NO: 15176 - protein, 7 aa, synthetic construct
LWCTELE

SEQ ID NO: 15177 - protein, 9 aa, synthetic construct
EVEDLISWT

SEQ ID NO: 15178 - protein, 9 aa, synthetic construct
DSAFEQITL

SEQ ID NO: 15179 - protein, 11 aa, synthetic construct
EGADPDSIEMV

SEQ ID NO: 15180 - protein, 9 aa, synthetic construct
FEEGGIELL

SEQ ID NO: 15181 - protein, 9 aa, synthetic construct
IDAVFEEFG

SEQ ID NO: 15182 - protein, 8 aa, synthetic construct
NAFDEQMM

SEQ ID NO: 15183 - protein, 8 aa, synthetic construct
DTEFKTGT

SEQ ID NO: 15184 - protein, 8 aa, synthetic construct
QMLHPIFE

SEQ ID NO: 15185 - protein, 10 aa, synthetic construct
ELPDMPSSGD

SEQ ID NO: 15186 - protein, 10 aa, synthetic construct
QTQFQGPSGD

SEQ ID NO: 15187 - protein, 9 aa, synthetic construct
VAIDFTHEE

SEQ ID NO: 15188 - protein, 9 aa, synthetic construct
SAIYAKYKL

SEQ ID NO: 15189 - protein, 8 aa, synthetic construct
VLELFLPV

SEQ ID NO: 15190 - protein, 11 aa, synthetic construct
LLQWMPTVNAS

SEQ ID NO: 15191 - protein, 10 aa, synthetic construct
ELFTHLSQRE

SEQ ID NO: 15192 - protein, 11 aa, synthetic construct
LLAFEGLNTAA

SEQ ID NO: 15193 - protein, 8 aa, synthetic construct
TVCSKILA

SEQ ID NO: 15194 - protein, 8 aa, synthetic construct
VEDIAEHF

SEQ ID NO: 15195 - protein, 10 aa, synthetic construct
EGGPEPEPSL

SEQ ID NO: 15196 - protein, 8 aa, synthetic construct
ADFIRIEL

SEQ ID NO: 15197 - protein, 7 aa, synthetic construct
SLHFKWE

SEQ ID NO: 15198 - protein, 9 aa, synthetic construct
VSQPRILSL

SEQ ID NO: 15199 - protein, 12 aa, synthetic construct
GPGTRSAAREDD

SEQ ID NO: 15200 - protein, 11 aa, synthetic construct
PTQALELTEDD

SEQ ID NO: 15201 - protein, 11 aa, synthetic construct
EELKGPVTDDE

SEQ ID NO: 15202 - protein, 11 aa, synthetic construct
NDEVLEVNGIE

SEQ ID NO: 15203 - protein, 8 aa, synthetic construct
TTPIHKII

SEQ ID NO: 15204 - protein, 9 aa, synthetic construct
EEPGLGLLM

SEQ ID NO: 15205 - protein, 9 aa, synthetic construct
LLQPDGEFP

SEQ ID NO: 15206 - protein, 9 aa, synthetic construct
VFETSPLYS

SEQ ID NO: 15207 - protein, 11 aa, synthetic construct
EGVLIDAMRKG

SEQ ID NO: 15208 - protein, 10 aa, synthetic construct
EPNGVNSVEM

SEQ ID NO: 15209 - protein, 10 aa, synthetic construct
EVGLDPSNNM

SEQ ID NO: 15210 - protein, 9 aa, synthetic construct
YEQLKRKKM

SEQ ID NO: 15211 - protein, 8 aa, synthetic construct
LDFSKKIL

SEQ ID NO: 15212 - protein, 9 aa, synthetic construct
QKREQQTLG

SEQ ID NO: 15213 - protein, 11 aa, synthetic construct
GTVIAPCSLGL

SEQ ID NO: 15214 - protein, 8 aa, synthetic construct
EHIEELLR

SEQ ID NO: 15215 - protein, 9 aa, synthetic construct
EHLEGVINK

SEQ ID NO: 15216 - protein, 9 aa, synthetic construct
QHSLKGMEH

SEQ ID NO: 15217 - protein, 8 aa, synthetic construct
EHVELLRA

SEQ ID NO: 15218 - protein, 9 aa, synthetic construct
LEAVKEKSY

SEQ ID NO: 15219 - protein, 9 aa, synthetic construct
TPDTLSVVC

SEQ ID NO: 15220 - protein, 10 aa, synthetic construct
PETTVSAMGV

SEQ ID NO: 15221 - protein, 9 aa, synthetic construct
LDDLGYIGY

SEQ ID NO: 15222 - protein, 9 aa, synthetic construct
ELSPMPPEF

SEQ ID NO: 15223 - protein, 9 aa, synthetic construct
LCGFLSTLY

SEQ ID NO: 15224 - protein, 11 aa, synthetic construct
IEACVQTGTRF

SEQ ID NO: 15225 - protein, 9 aa, synthetic construct
AQIEVTSSF

SEQ ID NO: 15226 - protein, 10 aa, synthetic construct
EIAVGHLDLL

SEQ ID NO: 15227 - protein, 10 aa, synthetic construct
FSLVNGDDMF

SEQ ID NO: 15228 - protein, 11 aa, synthetic construct
IEELQNKILTA

SEQ ID NO: 15229 - protein, 10 aa, synthetic construct
ELEIRIKELE

SEQ ID NO: 15230 - protein, 11 aa, synthetic construct
ELELQILTEAI

SEQ ID NO: 15231 - protein, 10 aa, synthetic construct
EIIFNGIADW

SEQ ID NO: 15232 - protein, 9 aa, synthetic construct
ELFPRCQPF

SEQ ID NO: 15233 - protein, 9 aa, synthetic construct
LEDGIIEFY

SEQ ID NO: 15234 - protein, 10 aa, synthetic construct
ELFVSIGHLS

SEQ ID NO: 15235 - protein, 11 aa, synthetic construct
LSFVAVNGFSA

SEQ ID NO: 15236 - protein, 11 aa, synthetic construct
GFTPTMSSIEE

SEQ ID NO: 15237 - protein, 9 aa, synthetic construct
LSFKNHCMD

SEQ ID NO: 15238 - protein, 11 aa, synthetic construct
ELEDGDDPAAY

SEQ ID NO: 15239 - protein, 11 aa, synthetic construct
IKGAETETAPF

SEQ ID NO: 15240 - protein, 9 aa, synthetic construct
ELLRLAQAH

SEQ ID NO: 15241 - protein, 8 aa, synthetic construct
EKEELSEM

SEQ ID NO: 15242 - protein, 9 aa, synthetic construct
ESSGEEIIM

SEQ ID NO: 15243 - protein, 10 aa, synthetic construct
KDNVVDEGFY

SEQ ID NO: 15244 - protein, 9 aa, synthetic construct
GVRERDAFY

SEQ ID NO: 15245 - protein, 10 aa, synthetic construct
LEELHLEGLF

SEQ ID NO: 15246 - protein, 9 aa, synthetic construct
ELIEEYEVF

SEQ ID NO: 15247 - protein, 10 aa, synthetic construct
IILDSVDAAF

SEQ ID NO: 15248 - protein, 10 aa, synthetic construct
EIVKRLQFVS

SEQ ID NO: 15249 - protein, 10 aa, synthetic construct
NKLRLAEIVY

SEQ ID NO: 15250 - protein, 9 aa, synthetic construct
ELLPSGFCL

SEQ ID NO: 15251 - protein, 10 aa, synthetic construct
IEIVSTGILM

SEQ ID NO: 15252 - protein, 10 aa, synthetic construct
LSGLLLESIM

SEQ ID NO: 15253 - protein, 10 aa, synthetic construct
ELIQLGQDER

SEQ ID NO: 15254 - protein, 8 aa, synthetic construct
VYRKLIEL

SEQ ID NO: 15255 - protein, 9 aa, synthetic construct
TSLELSSLF

SEQ ID NO: 15256 - protein, 11 aa, synthetic construct
LEGVSLILFGS

SEQ ID NO: 15257 - protein, 9 aa, synthetic construct
YNIKIDKEL

SEQ ID NO: 15258 - protein, 9 aa, synthetic construct
DIKELLEPM

SEQ ID NO: 15259 - protein, 10 aa, synthetic construct
ELLGLDCSKY

SEQ ID NO: 15260 - protein, 9 aa, synthetic construct
ELKLKEIQL

SEQ ID NO: 15261 - protein, 9 aa, synthetic construct
TIEKELISF

SEQ ID NO: 15262 - protein, 9 aa, synthetic construct
ELLDKLEIF

SEQ ID NO: 15263 - protein, 10 aa, synthetic construct
VKAVLAESYE

SEQ ID NO: 15264 - protein, 10 aa, synthetic construct
ATVQVKFSEL

SEQ ID NO: 15265 - protein, 9 aa, synthetic construct
NKKGKTISL

SEQ ID NO: 15266 - protein, 9 aa, synthetic construct
IEKKLKETL

SEQ ID NO: 15267 - protein, 11 aa, synthetic construct
ASLLKSLASVL

SEQ ID NO: 15268 - protein, 8 aa, synthetic construct
ELIQKIHT

SEQ ID NO: 15269 - protein, 9 aa, synthetic construct
QIPSLYCSY

SEQ ID NO: 15270 - protein, 8 aa, synthetic construct
NEVVSYEI

SEQ ID NO: 15271 - protein, 8 aa, synthetic construct
IEELQVAF

SEQ ID NO: 15272 - protein, 8 aa, synthetic construct
LTLQSSYL

SEQ ID NO: 15273 - protein, 9 aa, synthetic construct
ELKGLSFPP

SEQ ID NO: 15274 - protein, 9 aa, synthetic construct
EIQISPSLY

SEQ ID NO: 15275 - protein, 9 aa, synthetic construct
QIEMLGAEH

SEQ ID NO: 15276 - protein, 9 aa, synthetic construct
EERKLLRII

SEQ ID NO: 15277 - protein, 10 aa, synthetic construct
TQTLLNLAEF

SEQ ID NO: 15278 - protein, 10 aa, synthetic construct
AGKDLRLVSI

SEQ ID NO: 15279 - protein, 10 aa, synthetic construct
LRSGLLIVTG

SEQ ID NO: 15280 - protein, 9 aa, synthetic construct
EIRAQARAL

SEQ ID NO: 15281 - protein, 10 aa, synthetic construct
RLQSLGNISL

SEQ ID NO: 15282 - protein, 9 aa, synthetic construct
LLNEIESVY

SEQ ID NO: 15283 - protein, 10 aa, synthetic construct
SILNFSEEGY

SEQ ID NO: 15284 - protein, 9 aa, synthetic construct
ILSEKGHIE

SEQ ID NO: 15285 - protein, 9 aa, synthetic construct
ELAESILEY

SEQ ID NO: 15286 - protein, 8 aa, synthetic construct
ELLTTKAD

SEQ ID NO: 15287 - protein, 9 aa, synthetic construct
VDDIISTEF

SEQ ID NO: 15288 - protein, 9 aa, synthetic construct
EIVHKLLGD

SEQ ID NO: 15289 - protein, 9 aa, synthetic construct
EVLEKILVS

SEQ ID NO: 15290 - protein, 9 aa, synthetic construct
EAVSLILGF

SEQ ID NO: 15291 - protein, 9 aa, synthetic construct
QLPRLEAGQ

SEQ ID NO: 15292 - protein, 9 aa, synthetic construct
LENIHLAGQ

SEQ ID NO: 15293 - protein, 9 aa, synthetic construct
ELVLKDTSY

SEQ ID NO: 15294 - protein, 10 aa, synthetic construct
LSPVATSSYG

SEQ ID NO: 15295 - protein, 10 aa, synthetic construct
EIVHQLPSNK

SEQ ID NO: 15296 - protein, 9 aa, synthetic construct
EIVWLKDAQ

SEQ ID NO: 15297 - protein, 9 aa, synthetic construct
ETILSLLTP

SEQ ID NO: 15298 - protein, 11 aa, synthetic construct
IEYGHAAPGTD

SEQ ID NO: 15299 - protein, 10 aa, synthetic construct
EIITNQIPKY

SEQ ID NO: 15300 - protein, 11 aa, synthetic construct
ELYALPPPPQF

SEQ ID NO: 15301 - protein, 9 aa, synthetic construct
ELYTMMTDK

SEQ ID NO: 15302 - protein, 12 aa, synthetic construct
QPPPANGSYDSF

SEQ ID NO: 15303 - protein, 11 aa, synthetic construct
FIISNGGAQTY

SEQ ID NO: 15304 - protein, 10 aa, synthetic construct
KDPSKSILDV

SEQ ID NO: 15305 - protein, 8 aa, synthetic construct
EFLLKEAT

SEQ ID NO: 15306 - protein, 8 aa, synthetic construct
KEKKVLLI

SEQ ID NO: 15307 - protein, 11 aa, synthetic construct
SKPSGLSLLPD

SEQ ID NO: 15308 - protein, 10 aa, synthetic construct
QIESAKLLPD

SEQ ID NO: 15309 - protein, 9 aa, synthetic construct
LDLEGGSEY

SEQ ID NO: 15310 - protein, 9 aa, synthetic construct
ELAKTRLQL

SEQ ID NO: 15311 - protein, 11 aa, synthetic construct
ELAAAAKLGSF

SEQ ID NO: 15312 - protein, 9 aa, synthetic construct
LEAAWGQYT

SEQ ID NO: 15313 - protein, 9 aa, synthetic construct
ALEQSKTFY

SEQ ID NO: 15314 - protein, 9 aa, synthetic construct
LEASLPMIS

SEQ ID NO: 15315 - protein, 9 aa, synthetic construct
YQDISELVY

SEQ ID NO: 15316 - protein, 10 aa, synthetic construct
LEDFYTRMMH

SEQ ID NO: 15317 - protein, 11 aa, synthetic construct
SMTPPMVNAYY

SEQ ID NO: 15318 - protein, 9 aa, synthetic construct
LEKNQITAL

SEQ ID NO: 15319 - protein, 10 aa, synthetic construct
QLTVLHRALL

SEQ ID NO: 15320 - protein, 9 aa, synthetic construct
LELTLMIKS

SEQ ID NO: 15321 - protein, 9 aa, synthetic construct
ELKMRNPAI

SEQ ID NO: 15322 - protein, 10 aa, synthetic construct
LEIHGLFETQ

SEQ ID NO: 15323 - protein, 10 aa, synthetic construct
IEHADFAGVE

SEQ ID NO: 15324 - protein, 10 aa, synthetic construct
SLTPARLLPV

SEQ ID NO: 15325 - protein, 8 aa, synthetic construct
LELAEEKL

SEQ ID NO: 15326 - protein, 9 aa, synthetic construct
EILAINKPF

SEQ ID NO: 15327 - protein, 9 aa, synthetic construct
LEAIKLQMV

SEQ ID NO: 15328 - protein, 10 aa, synthetic construct
IELDNCPLIT

SEQ ID NO: 15329 - protein, 10 aa, synthetic construct
LEINQFTPEP

SEQ ID NO: 15330 - protein, 9 aa, synthetic construct
LEIIEAIYK

SEQ ID NO: 15331 - protein, 10 aa, synthetic construct
LEILPYSGSM

SEQ ID NO: 15332 - protein, 9 aa, synthetic construct
LEQALEAQY

SEQ ID NO: 15333 - protein, 9 aa, synthetic construct
ELLLEREPL

SEQ ID NO: 15334 - protein, 9 aa, synthetic construct
ITMDELPLI

SEQ ID NO: 15335 - protein, 10 aa, synthetic construct
EGYGLEIPDI

SEQ ID NO: 15336 - protein, 10 aa, synthetic construct
TDGRRLSGEM

SEQ ID NO: 15337 - protein, 11 aa, synthetic construct
EILGRQDGVLQ

SEQ ID NO: 15338 - protein, 11 aa, synthetic construct
AEQGQGLLEER

SEQ ID NO: 15339 - protein, 8 aa, synthetic construct
ELKLKHLI

SEQ ID NO: 15340 - protein, 9 aa, synthetic construct
EIKIIREAY

SEQ ID NO: 15341 - protein, 9 aa, synthetic construct
MISEIRTAF

SEQ ID NO: 15342 - protein, 9 aa, synthetic construct
QLFFNITAF

SEQ ID NO: 15343 - protein, 10 aa, synthetic construct
HGTILDPSTA

SEQ ID NO: 15344 - protein, 8 aa, synthetic construct
ELLQKLTA

SEQ ID NO: 15345 - protein, 9 aa, synthetic construct
LEIYQKLTF

SEQ ID NO: 15346 - protein, 10 aa, synthetic construct
ELITGKVSFL

SEQ ID NO: 15347 - protein, 10 aa, synthetic construct
ELLSAVKRSL

SEQ ID NO: 15348 - protein, 9 aa, synthetic construct
ELKKLEYIS

SEQ ID NO: 15349 - protein, 9 aa, synthetic construct
HFLKELAEY

SEQ ID NO: 15350 - protein, 9 aa, synthetic construct
VSIALAQYL

SEQ ID NO: 15351 - protein, 9 aa, synthetic construct
EIKLRSFLK

SEQ ID NO: 15352 - protein, 10 aa, synthetic construct
GGKLILSVLY

SEQ ID NO: 15353 - protein, 10 aa, synthetic construct
AGKTTIPYEL

SEQ ID NO: 15354 - protein, 10 aa, synthetic construct
ELLGLVKEYL

SEQ ID NO: 15355 - protein, 10 aa, synthetic construct
QVRRPARPTI

SEQ ID NO: 15356 - protein, 9 aa, synthetic construct
LEKQRNLYI

SEQ ID NO: 15357 - protein, 9 aa, synthetic construct
KRLEKMKEI

SEQ ID NO: 15358 - protein, 10 aa, synthetic construct
LKISRGLINI

SEQ ID NO: 15359 - protein, 9 aa, synthetic construct
LELRKILFP

SEQ ID NO: 15360 - protein, 8 aa, synthetic construct
ELITKARL

SEQ ID NO: 15361 - protein, 9 aa, synthetic construct
ELLQYGLKG

SEQ ID NO: 15362 - protein, 9 aa, synthetic construct
ELLKTALIH

SEQ ID NO: 15363 - protein, 9 aa, synthetic construct
INEKGEREL

SEQ ID NO: 15364 - protein, 10 aa, synthetic construct
IPVMLLGVTL

SEQ ID NO: 15365 - protein, 10 aa, synthetic construct
ELVEKSTGKY

SEQ ID NO: 15366 - protein, 9 aa, synthetic construct
LEEWLMEAL

SEQ ID NO: 15367 - protein, 8 aa, synthetic construct
EIRDIQTI

SEQ ID NO: 15368 - protein, 9 aa, synthetic construct
LEQGFLRHG

SEQ ID NO: 15369 - protein, 9 aa, synthetic construct
LEGRKAFLL

SEQ ID NO: 15370 - protein, 9 aa, synthetic construct
EIERKLESL

SEQ ID NO: 15371 - protein, 9 aa, synthetic construct
KELRKDLVL

SEQ ID NO: 15372 - protein, 9 aa, synthetic construct
LERKVKELV

SEQ ID NO: 15373 - protein, 10 aa, synthetic construct
GLTRVLQPLL

SEQ ID NO: 15374 - protein, 9 aa, synthetic construct
ELRREIKRL

SEQ ID NO: 15375 - protein, 9 aa, synthetic construct
QLRNQTLDF

SEQ ID NO: 15376 - protein, 9 aa, synthetic construct
LILDDSLIY

SEQ ID NO: 15377 - protein, 11 aa, synthetic construct
QGTATMEVQLS

SEQ ID NO: 15378 - protein, 10 aa, synthetic construct
LETAEEIQER

SEQ ID NO: 15379 - protein, 13 aa, synthetic construct
GTGGAGLLGALSY

SEQ ID NO: 15380 - protein, 9 aa, synthetic construct
ELVTRGRSI

SEQ ID NO: 15381 - protein, 10 aa, synthetic construct
LESPAKSSVL

SEQ ID NO: 15382 - protein, 11 aa, synthetic construct
WTKKDPDGFLE

SEQ ID NO: 15383 - protein, 8 aa, synthetic construct
ELVKYKII

SEQ ID NO: 15384 - protein, 11 aa, synthetic construct
EIYDLQSKCQG

SEQ ID NO: 15385 - protein, 9 aa, synthetic construct
EFYLLELMV

SEQ ID NO: 15386 - protein, 10 aa, synthetic construct
LEASGRIYVY

SEQ ID NO: 15387 - protein, 11 aa, synthetic construct
SPPVFNSPGSY

SEQ ID NO: 15388 - protein, 11 aa, synthetic construct
QALGMRTAKDV

SEQ ID NO: 15389 - protein, 10 aa, synthetic construct
EAGNEDPALG

SEQ ID NO: 15390 - protein, 10 aa, synthetic construct
GEGGDAKSQE

SEQ ID NO: 15391 - protein, 11 aa, synthetic construct
ATATPASLPKF

SEQ ID NO: 15392 - protein, 10 aa, synthetic construct
SAFGLDSFKV

SEQ ID NO: 15393 - protein, 9 aa, synthetic construct
QSDHALMLR

SEQ ID NO: 15394 - protein, 10 aa, synthetic construct
QDSFVFDIKT

SEQ ID NO: 15395 - protein, 11 aa, synthetic construct
TQTMLSFLAAT

SEQ ID NO: 15396 - protein, 10 aa, synthetic construct
AVPEASSTVY

SEQ ID NO: 15397 - protein, 9 aa, synthetic construct
ERNVLIFDL

SEQ ID NO: 15398 - protein, 9 aa, synthetic construct
QRTTSSAIY

SEQ ID NO: 15399 - protein, 9 aa, synthetic construct
KDSNLSFEE

SEQ ID NO: 15400 - protein, 9 aa, synthetic construct
QSIVSPYTS

SEQ ID NO: 15401 - protein, 8 aa, synthetic construct
YPEYLITY

SEQ ID NO: 15402 - protein, 9 aa, synthetic construct
TLPSPSIEY

SEQ ID NO: 15403 - protein, 8 aa, synthetic construct
EPQRVCAL

SEQ ID NO: 15404 - protein, 10 aa, synthetic construct
LMEEDAEPIF

SEQ ID NO: 15405 - protein, 8 aa, synthetic construct
QYGLDPEF

SEQ ID NO: 15406 - protein, 9 aa, synthetic construct
APESLDVVY

SEQ ID NO: 15407 - protein, 10 aa, synthetic construct
EHCSEVELPY

SEQ ID NO: 15408 - protein, 10 aa, synthetic construct
ATNSLHLTTF

SEQ ID NO: 15409 - protein, 10 aa, synthetic construct
VGKIDHSVSY

SEQ ID NO: 15410 - protein, 10 aa, synthetic construct
MWTSLGMSYV

SEQ ID NO: 15411 - protein, 8 aa, synthetic construct
CGRPQDEL

SEQ ID NO: 15412 - protein, 10 aa, synthetic construct
FHETGMAFIT

SEQ ID NO: 15413 - protein, 9 aa, synthetic construct
FPESSEIPP

SEQ ID NO: 15414 - protein, 9 aa, synthetic construct
ETKQPAILY

SEQ ID NO: 15415 - protein, 9 aa, synthetic construct
QNDSPFGVF

SEQ ID NO: 15416 - protein, 9 aa, synthetic construct
LEYLPTYIE

SEQ ID NO: 15417 - protein, 10 aa, synthetic construct
KTGSELTVYE

SEQ ID NO: 15418 - protein, 13 aa, synthetic construct
PSAKTDEVVSDQT

SEQ ID NO: 15419 - protein, 9 aa, synthetic construct
RHRKIHTDL

SEQ ID NO: 15420 - protein, 9 aa, synthetic construct
IALPEVMMA

SEQ ID NO: 15421 - protein, 9 aa, synthetic construct
EPLLTLERL

SEQ ID NO: 15422 - protein, 9 aa, synthetic construct
DLPLLVAAF

SEQ ID NO: 15423 - protein, 9 aa, synthetic construct
VPAEQESFA

SEQ ID NO: 15424 - protein, 10 aa, synthetic construct
MSGKHDVGAY

SEQ ID NO: 15425 - protein, 9 aa, synthetic construct
GEPRIPAPI

SEQ ID NO: 15426 - protein, 9 aa, synthetic construct
SHAMKITYA

SEQ ID NO: 15427 - protein, 9 aa, synthetic construct
EPLVLGGRL

SEQ ID NO: 15428 - protein, 9 aa, synthetic construct
TFSEHLTSY

SEQ ID NO: 15429 - protein, 8 aa, synthetic construct
CLSCFLPM

SEQ ID NO: 15430 - protein, 8 aa, synthetic construct
WFLEVLFL

SEQ ID NO: 15431 - protein, 9 aa, synthetic construct
TTINMLNVF

SEQ ID NO: 15432 - protein, 10 aa, synthetic construct
FEKLQLFYPE

SEQ ID NO: 15433 - protein, 10 aa, synthetic construct
VPQSAPMYQY

SEQ ID NO: 15434 - protein, 9 aa, synthetic construct
QMLFSKQDF

SEQ ID NO: 15435 - protein, 11 aa, synthetic construct
SAMAATTTTAI

SEQ ID NO: 15436 - protein, 10 aa, synthetic construct
EALTKILAEL

SEQ ID NO: 15437 - protein, 10 aa, synthetic construct
RANGEVNPQY

SEQ ID NO: 15438 - protein, 8 aa, synthetic construct
PERGPQSL

SEQ ID NO: 15439 - protein, 9 aa, synthetic construct
NVHSSIMSI

SEQ ID NO: 15440 - protein, 9 aa, synthetic construct
ELPSGAEIL

SEQ ID NO: 15441 - protein, 9 aa, synthetic construct
EIMESLTSY

SEQ ID NO: 15442 - protein, 8 aa, synthetic construct
DHWSFLAP

SEQ ID NO: 15443 - protein, 9 aa, synthetic construct
EPSPFDPGI

SEQ ID NO: 15444 - protein, 9 aa, synthetic construct
QSLASAIAY

SEQ ID NO: 15445 - protein, 9 aa, synthetic construct
DPDLLSTDS

SEQ ID NO: 15446 - protein, 9 aa, synthetic construct
DEVLPSTSM

SEQ ID NO: 15447 - protein, 13 aa, synthetic construct
RAPEGRASAVAGM

SEQ ID NO: 15448 - protein, 11 aa, synthetic construct
LKELDPAEHSY

SEQ ID NO: 15449 - protein, 10 aa, synthetic construct
PEAVTRIPYL

SEQ ID NO: 15450 - protein, 12 aa, synthetic construct
ASPGCARGTSTS

SEQ ID NO: 15451 - protein, 9 aa, synthetic construct
QELMETCYQ

SEQ ID NO: 15452 - protein, 10 aa, synthetic construct
YEPYPDDGMG

SEQ ID NO: 15453 - protein, 10 aa, synthetic construct
VASEDMPESL

SEQ ID NO: 15454 - protein, 12 aa, synthetic construct
QMPTIADRSAAP

SEQ ID NO: 15455 - protein, 8 aa, synthetic construct
EFQLLSNL

SEQ ID NO: 15456 - protein, 8 aa, synthetic construct
EQLFIPVI

SEQ ID NO: 15457 - protein, 11 aa, synthetic construct
GIPETTLQGAY

SEQ ID NO: 15458 - protein, 10 aa, synthetic construct
DIEQLLFSQG

SEQ ID NO: 15459 - protein, 11 aa, synthetic construct
EAGLEGTHVGL

SEQ ID NO: 15460 - protein, 8 aa, synthetic construct
EIQRLKNI

SEQ ID NO: 15461 - protein, 9 aa, synthetic construct
ARPSQLRPN

SEQ ID NO: 15462 - protein, 8 aa, synthetic construct
ELQTVAEI

SEQ ID NO: 15463 - protein, 9 aa, synthetic construct
TKCKKEEKV

SEQ ID NO: 15464 - protein, 10 aa, synthetic construct
DSLNVMKTCI

SEQ ID NO: 15465 - protein, 9 aa, synthetic construct
EAVDGLYKM

SEQ ID NO: 15466 - protein, 9 aa, synthetic construct
STPASTPEL

SEQ ID NO: 15467 - protein, 11 aa, synthetic construct
EQEMAKAGLCE

SEQ ID NO: 15468 - protein, 9 aa, synthetic construct
IKDSFQEVI

SEQ ID NO: 15469 - protein, 11 aa, synthetic construct
AAPGERNPVVL

SEQ ID NO: 15470 - protein, 8 aa, synthetic construct
YPCPGLEI

SEQ ID NO: 15471 - protein, 10 aa, synthetic construct
SMPLLMVSLV

SEQ ID NO: 15472 - protein, 8 aa, synthetic construct
IEQYTFIY

SEQ ID NO: 15473 - protein, 9 aa, synthetic construct
QYKVLVHSQ

SEQ ID NO: 15474 - protein, 9 aa, synthetic construct
NLQLTQAYL

SEQ ID NO: 15475 - protein, 9 aa, synthetic construct
NEFRSLILV

SEQ ID NO: 15476 - protein, 10 aa, synthetic construct
GVAWESQLKP

SEQ ID NO: 15477 - protein, 11 aa, synthetic construct
VNTIDLGNKKR

SEQ ID NO: 15478 - protein, 11 aa, synthetic construct
LKRELENVKAK

SEQ ID NO: 15479 - protein, 10 aa, synthetic construct
GILEVNIIQM

SEQ ID NO: 15480 - protein, 9 aa, synthetic construct
LLRLENLQM

SEQ ID NO: 15481 - protein, 10 aa, synthetic construct
LRSHFILKAG

SEQ ID NO: 15482 - protein, 11 aa, synthetic construct
KMTGIGKGFGY

SEQ ID NO: 15483 - protein, 10 aa, synthetic construct
QGSEFLEEPD

SEQ ID NO: 15484 - protein, 10 aa, synthetic construct
QGDTLMDLLS

SEQ ID NO: 15485 - protein, 9 aa, synthetic construct
EVTVEEDSY

SEQ ID NO: 15486 - protein, 9 aa, synthetic construct
SLDCNAEVY

SEQ ID NO: 15487 - protein, 8 aa, synthetic construct
MHLEEMQH

SEQ ID NO: 15488 - protein, 11 aa, synthetic construct
ETGAASFLCRY

SEQ ID NO: 15489 - protein, 11 aa, synthetic construct
SEDLGSLHPGA

SEQ ID NO: 15490 - protein, 9 aa, synthetic construct
THMATLGQY

SEQ ID NO: 15491 - protein, 8 aa, synthetic construct
CFDPIVYY

SEQ ID NO: 15492 - protein, 11 aa, synthetic construct
DTSPDEGLIED

SEQ ID NO: 15493 - protein, 11 aa, synthetic construct
EESAETPALED

SEQ ID NO: 15494 - protein, 9 aa, synthetic construct
FYWNNVYDY

SEQ ID NO: 15495 - protein, 10 aa, synthetic construct
PGQLNGGSCW

SEQ ID NO: 15496 - protein, 9 aa, synthetic construct
FESFNGMVS

SEQ ID NO: 15497 - protein, 10 aa, synthetic construct
QTPAEPTPGY

SEQ ID NO: 15498 - protein, 10 aa, synthetic construct
PPGNVSQVVF

SEQ ID NO: 15499 - protein, 9 aa, synthetic construct
LFLEGLLAI

SEQ ID NO: 15500 - protein, 8 aa, synthetic construct
IYEDLKMY

SEQ ID NO: 15501 - protein, 10 aa, synthetic construct
RAADEAVIEM

SEQ ID NO: 15502 - protein, 10 aa, synthetic construct
DTSAHPDVQK

SEQ ID NO: 15503 - protein, 9 aa, synthetic construct
IDGSTLSAF

SEQ ID NO: 15504 - protein, 11 aa, synthetic construct
CLASEGMKMEE

SEQ ID NO: 15505 - protein, 9 aa, synthetic construct
AVDVELTAY

SEQ ID NO: 15506 - protein, 10 aa, synthetic construct
PNAVPVLNSE

SEQ ID NO: 15507 - protein, 10 aa, synthetic construct
ITSYDTAGSF

SEQ ID NO: 15508 - protein, 9 aa, synthetic construct
ANGAMGHGF

SEQ ID NO: 15509 - protein, 11 aa, synthetic construct
EGKPQGEGKPA

SEQ ID NO: 15510 - protein, 11 aa, synthetic construct
PANESSKLVSE

SEQ ID NO: 15511 - protein, 9 aa, synthetic construct
ETLDATHLA

SEQ ID NO: 15512 - protein, 12 aa, synthetic construct
TEDATLSPELPP

SEQ ID NO: 15513 - protein, 12 aa, synthetic construct
PDANGKAHFNLT

SEQ ID NO: 15514 - protein, 9 aa, synthetic construct
TEDGLKAVI

SEQ ID NO: 15515 - protein, 10 aa, synthetic construct
PPAGTLFAPD

SEQ ID NO: 15516 - protein, 8 aa, synthetic construct
EIWKFSTY

SEQ ID NO: 15517 - protein, 9 aa, synthetic construct
GDVVTIGGF

SEQ ID NO: 15518 - protein, 9 aa, synthetic construct
DSPPLLDAP

SEQ ID NO: 15519 - protein, 10 aa, synthetic construct
AESQTLSPVY

SEQ ID NO: 15520 - protein, 10 aa, synthetic construct
QLGESSVSYP

SEQ ID NO: 15521 - protein, 12 aa, synthetic construct
GEASTIEIPPGE

SEQ ID NO: 15522 - protein, 9 aa, synthetic construct
QSPTSIASY

SEQ ID NO: 15523 - protein, 9 aa, synthetic construct
ETTAAQLTY

SEQ ID NO: 15524 - protein, 10 aa, synthetic construct
IGHIALLAPD

SEQ ID NO: 15525 - protein, 9 aa, synthetic construct
LELASLGYS

SEQ ID NO: 15526 - protein, 11 aa, synthetic construct
CHCSASYLPPD

SEQ ID NO: 15527 - protein, 11 aa, synthetic construct
YGHDPASGGIF

SEQ ID NO: 15528 - protein, 9 aa, synthetic construct
QCTATELYQ

SEQ ID NO: 15529 - protein, 12 aa, synthetic construct
DDDNLPTQELYY

SEQ ID NO: 15530 - protein, 12 aa, synthetic construct
AGGTFTGEALQY

SEQ ID NO: 15531 - protein, 11 aa, synthetic construct
ESEIISYEKQQ

SEQ ID NO: 15532 - protein, 10 aa, synthetic construct
VIGEDGQSVY

SEQ ID NO: 15533 - protein, 9 aa, synthetic construct
YETDNNIVV

SEQ ID NO: 15534 - protein, 9 aa, synthetic construct
ETEDVQGLY

SEQ ID NO: 15535 - protein, 11 aa, synthetic construct
CCTSLEKLLLY

SEQ ID NO: 15536 - protein, 12 aa, synthetic construct
QEDHNGGQKQLS

SEQ ID NO: 15537 - protein, 10 aa, synthetic construct
QLGLSHEVTE

SEQ ID NO: 15538 - protein, 9 aa, synthetic construct
ATEYEYLDY

SEQ ID NO: 15539 - protein, 10 aa, synthetic construct
TEEFGGAQLF

SEQ ID NO: 15540 - protein, 10 aa, synthetic construct
QFHNTQPHSP

SEQ ID NO: 15541 - protein, 9 aa, synthetic construct
DTQYIWESE

SEQ ID NO: 15542 - protein, 9 aa, synthetic construct
NYHSFLTEH

SEQ ID NO: 15543 - protein, 9 aa, synthetic construct
VYKQYEDMV

SEQ ID NO: 15544 - protein, 10 aa, synthetic construct
ETFVSSTRFV

SEQ ID NO: 15545 - protein, 10 aa, synthetic construct
IGETYPYQYS

SEQ ID NO: 15546 - protein, 12 aa, synthetic construct
SSQSSNSESETE

SEQ ID NO: 15547 - protein, 13 aa, synthetic construct
YAESLAQGGGFSY

SEQ ID NO: 15548 - protein, 9 aa, synthetic construct
YIKVNAETY

SEQ ID NO: 15549 - protein, 9 aa, synthetic construct
QTDFTVTMM

SEQ ID NO: 15550 - protein, 10 aa, synthetic construct
SFDFSAGDPF

SEQ ID NO: 15551 - protein, 11 aa, synthetic construct
VITSPNYPVQY

SEQ ID NO: 15552 - protein, 8 aa, synthetic construct
ETFAKPEI

SEQ ID NO: 15553 - protein, 10 aa, synthetic construct
IATLTGFPDF

SEQ ID NO: 15554 - protein, 10 aa, synthetic construct
PESFGTPLPD

SEQ ID NO: 15555 - protein, 10 aa, synthetic construct
TEFYFLASMA

SEQ ID NO: 15556 - protein, 10 aa, synthetic construct
NLMSWRFIMD

SEQ ID NO: 15557 - protein, 11 aa, synthetic construct
PPAVAAAAEVP

SEQ ID NO: 15558 - protein, 10 aa, synthetic construct
FGPDSLLLPH

SEQ ID NO: 15559 - protein, 8 aa, synthetic construct
TIEDLQIY

SEQ ID NO: 15560 - protein, 9 aa, synthetic construct
FERLESNNY

SEQ ID NO: 15561 - protein, 13 aa, synthetic construct
TELNGSGEQGGSI

SEQ ID NO: 15562 - protein, 11 aa, synthetic construct
ETLELGARALG

SEQ ID NO: 15563 - protein, 10 aa, synthetic construct
TLETDIQGGL

SEQ ID NO: 15564 - protein, 9 aa, synthetic construct
ETLEITQNL

SEQ ID NO: 15565 - protein, 11 aa, synthetic construct
CGDGLVGLSME

SEQ ID NO: 15566 - protein, 10 aa, synthetic construct
LLPGHVIPPD

SEQ ID NO: 15567 - protein, 10 aa, synthetic construct
TEIHLSPGKF

SEQ ID NO: 15568 - protein, 9 aa, synthetic construct
FTRQYKLPD

SEQ ID NO: 15569 - protein, 10 aa, synthetic construct
RPVDPDKVPE

SEQ ID NO: 15570 - protein, 9 aa, synthetic construct
GELIRMPKM

SEQ ID NO: 15571 - protein, 9 aa, synthetic construct
EWGKLLKLY

SEQ ID NO: 15572 - protein, 10 aa, synthetic construct
ITENMICAGY

SEQ ID NO: 15573 - protein, 8 aa, synthetic construct
TELQSWSQ

SEQ ID NO: 15574 - protein, 10 aa, synthetic construct
LVDQVPQVPE

SEQ ID NO: 15575 - protein, 12 aa, synthetic construct
DPESPVTPSTPG

SEQ ID NO: 15576 - protein, 9 aa, synthetic construct
RSEQLLLLH

SEQ ID NO: 15577 - protein, 12 aa, synthetic construct
AKGGSVGLGPHL

SEQ ID NO: 15578 - protein, 8 aa, synthetic construct
KRMQILHY

SEQ ID NO: 15579 - protein, 9 aa, synthetic construct
QRYSPQGGV

SEQ ID NO: 15580 - protein, 10 aa, synthetic construct
EIASLTLQEF

SEQ ID NO: 15581 - protein, 10 aa, synthetic construct
SSRRGSSTNS

SEQ ID NO: 15582 - protein, 11 aa, synthetic construct
DPQQWGLVIPD

SEQ ID NO: 15583 - protein, 9 aa, synthetic construct
LEGKSVIDF

SEQ ID NO: 15584 - protein, 12 aa, synthetic construct
ADPAPLEGSTQT

SEQ ID NO: 15585 - protein, 9 aa, synthetic construct
TEIYMTWMK

SEQ ID NO: 15586 - protein, 9 aa, synthetic construct
GRMPYLDMY

SEQ ID NO: 15587 - protein, 10 aa, synthetic construct
LKTELLEKQM

SEQ ID NO: 15588 - protein, 9 aa, synthetic construct
AMAELNDTY

SEQ ID NO: 15589 - protein, 9 aa, synthetic construct
NEFVLIKEY

SEQ ID NO: 15590 - protein, 9 aa, synthetic construct
ETVMQFLEK

SEQ ID NO: 15591 - protein, 9 aa, synthetic construct
DQTGYVEYY

SEQ ID NO: 15592 - protein, 10 aa, synthetic construct
DTQDIFSLFD

SEQ ID NO: 15593 - protein, 10 aa, synthetic construct
TEGPGDLLVE

SEQ ID NO: 15594 - protein, 9 aa, synthetic construct
TELIYKEVM

SEQ ID NO: 15595 - protein, 10 aa, synthetic construct
SESDGQIVTM

SEQ ID NO: 15596 - protein, 9 aa, synthetic construct
SSPLREPGF

SEQ ID NO: 15597 - protein, 10 aa, synthetic construct
EGISDLFDAY

SEQ ID NO: 15598 - protein, 9 aa, synthetic construct
EELSSQLFY

SEQ ID NO: 15599 - protein, 9 aa, synthetic construct
VSLGSEIAY

SEQ ID NO: 15600 - protein, 10 aa, synthetic construct
VIATESGMLY

SEQ ID NO: 15601 - protein, 9 aa, synthetic construct
EAMRLMVSY

SEQ ID NO: 15602 - protein, 10 aa, synthetic construct
SALLSLDTSI

SEQ ID NO: 15603 - protein, 11 aa, synthetic construct
DINCGTDLMFY

SEQ ID NO: 15604 - protein, 9 aa, synthetic construct
EETTLVVSY

SEQ ID NO: 15605 - protein, 11 aa, synthetic construct
ESLATAPTHVW

SEQ ID NO: 15606 - protein, 12 aa, synthetic construct
AEELHLVADVDP

SEQ ID NO: 15607 - protein, 10 aa, synthetic construct
VQAIFPTPDP

SEQ ID NO: 15608 - protein, 10 aa, synthetic construct
EVSLKTLAYE

SEQ ID NO: 15609 - protein, 10 aa, synthetic construct
VSSPTPLVPD

SEQ ID NO: 15610 - protein, 9 aa, synthetic construct
ENSILRKLY

SEQ ID NO: 15611 - protein, 9 aa, synthetic construct
EEKGVTLLY

SEQ ID NO: 15612 - protein, 9 aa, synthetic construct
QSLVSVPLS

SEQ ID NO: 15613 - protein, 9 aa, synthetic construct
TEVPSLVVK

SEQ ID NO: 15614 - protein, 9 aa, synthetic construct
LTDLLPPEV

SEQ ID NO: 15615 - protein, 11 aa, synthetic construct
GLGTELPPVSP

SEQ ID NO: 15616 - protein, 9 aa, synthetic construct
IDLRISSGM

SEQ ID NO: 15617 - protein, 11 aa, synthetic construct
GGDIQTISRLY

SEQ ID NO: 15618 - protein, 8 aa, synthetic construct
LEFSSSPD

SEQ ID NO: 15619 - protein, 10 aa, synthetic construct
QVALAASVPD

SEQ ID NO: 15620 - protein, 9 aa, synthetic construct
LEGMNKETF

SEQ ID NO: 15621 - protein, 10 aa, synthetic construct
TEVYAKANSF

SEQ ID NO: 15622 - protein, 10 aa, synthetic construct
LQYTDMIILM

SEQ ID NO: 15623 - protein, 10 aa, synthetic construct
YLSMASSAFT

SEQ ID NO: 15624 - protein, 10 aa, synthetic construct
YPADTNGSYA

SEQ ID NO: 15625 - protein, 9 aa, synthetic construct
LEYAIHDDY

SEQ ID NO: 15626 - protein, 12 aa, synthetic construct
YDADPAHHRGTY

SEQ ID NO: 15627 - protein, 11 aa, synthetic construct
SLGMSIVTSLY

SEQ ID NO: 15628 - protein, 9 aa, synthetic construct
GEIAAAVSF

SEQ ID NO: 15629 - protein, 10 aa, synthetic construct
QELGLAAYFV

SEQ ID NO: 15630 - protein, 9 aa, synthetic construct
DIAADYHKQ

SEQ ID NO: 15631 - protein, 9 aa, synthetic construct
EVAALDRAF

SEQ ID NO: 15632 - protein, 9 aa, synthetic construct
IDAAKNTFQ

SEQ ID NO: 15633 - protein, 8 aa, synthetic construct
RTAVPRKE

SEQ ID NO: 15634 - protein, 10 aa, synthetic construct
EGLEDISVEF

SEQ ID NO: 15635 - protein, 9 aa, synthetic construct
VCCEGRELL

SEQ ID NO: 15636 - protein, 11 aa, synthetic construct
LVTEGGGEIDF

SEQ ID NO: 15637 - protein, 10 aa, synthetic construct
TPTDLQLRDL

SEQ ID NO: 15638 - protein, 12 aa, synthetic construct
FGLQGSAVASSF

SEQ ID NO: 15639 - protein, 9 aa, synthetic construct
ELGDVVEAV

SEQ ID NO: 15640 - protein, 10 aa, synthetic construct
DTTPVITSVM

SEQ ID NO: 15641 - protein, 10 aa, synthetic construct
VEAMGHFGSG

SEQ ID NO: 15642 - protein, 10 aa, synthetic construct
QIGEETVITV

SEQ ID NO: 15643 - protein, 9 aa, synthetic construct
STQSLFEYM

SEQ ID NO: 15644 - protein, 10 aa, synthetic construct
VEAIALATLH

SEQ ID NO: 15645 - protein, 9 aa, synthetic construct
LDEAIHVLR

SEQ ID NO: 15646 - protein, 11 aa, synthetic construct
VEAEALSRVGQ

SEQ ID NO: 15647 - protein, 10 aa, synthetic construct
DIAEHFAVTV

SEQ ID NO: 15648 - protein, 9 aa, synthetic construct
LTPELKLYM

SEQ ID NO: 15649 - protein, 9 aa, synthetic construct
VNLLSVLMA

SEQ ID NO: 15650 - protein, 10 aa, synthetic construct
VALASLALSM

SEQ ID NO: 15651 - protein, 9 aa, synthetic construct
AEFVQQYAF

SEQ ID NO: 15652 - protein, 9 aa, synthetic construct
DIAPGAFSS

SEQ ID NO: 15653 - protein, 9 aa, synthetic construct
VEVSLAPAF

SEQ ID NO: 15654 - protein, 10 aa, synthetic construct
WLSDGTGAFY

SEQ ID NO: 15655 - protein, 11 aa, synthetic construct
YVNTAADSFEF

SEQ ID NO: 15656 - protein, 10 aa, synthetic construct
AIADLDPQFY

SEQ ID NO: 15657 - protein, 9 aa, synthetic construct
LGEQPLALV

SEQ ID NO: 15658 - protein, 11 aa, synthetic construct
GLETFLPSAVL

SEQ ID NO: 15659 - protein, 9 aa, synthetic construct
LDAFIPARA

SEQ ID NO: 15660 - protein, 9 aa, synthetic construct
DIALELQAY

SEQ ID NO: 15661 - protein, 10 aa, synthetic construct
DLAQDLKDLY

SEQ ID NO: 15662 - protein, 10 aa, synthetic construct
EVGTAVRVTW

SEQ ID NO: 15663 - protein, 9 aa, synthetic construct
TLCEALLMV

SEQ ID NO: 15664 - protein, 10 aa, synthetic construct
LNGLLMSAVM

SEQ ID NO: 15665 - protein, 8 aa, synthetic construct
YTYYLVIM

SEQ ID NO: 15666 - protein, 9 aa, synthetic construct
QGSINLTKV

SEQ ID NO: 15667 - protein, 8 aa, synthetic construct
LKDEYQYS

SEQ ID NO: 15668 - protein, 13 aa, synthetic construct
EGDQEPGLEPGDI

SEQ ID NO: 15669 - protein, 9 aa, synthetic construct
VEATDQHFI

SEQ ID NO: 15670 - protein, 9 aa, synthetic construct
YEVATFYTM

SEQ ID NO: 15671 - protein, 9 aa, synthetic construct
VENMGRLSF

SEQ ID NO: 15672 - protein, 9 aa, synthetic construct
EVATQWFGF

SEQ ID NO: 15673 - protein, 9 aa, synthetic construct
IALVHVEIY

SEQ ID NO: 15674 - protein, 10 aa, synthetic construct
TDFLSVFFSG

SEQ ID NO: 15675 - protein, 8 aa, synthetic construct
LCMRECVY

SEQ ID NO: 15676 - protein, 10 aa, synthetic construct
SMENSNSLYV

SEQ ID NO: 15677 - protein, 8 aa, synthetic construct
WKDTCETY

SEQ ID NO: 15678 - protein, 10 aa, synthetic construct
DLCVLQKCST

SEQ ID NO: 15679 - protein, 10 aa, synthetic construct
QVDFQAYFLY

SEQ ID NO: 15680 - protein, 9 aa, synthetic construct
KFQHSSISF

SEQ ID NO: 15681 - protein, 13 aa, synthetic construct
LCGGCTGSSSACY

SEQ ID NO: 15682 - protein, 8 aa, synthetic construct
KECEYLIG

SEQ ID NO: 15683 - protein, 11 aa, synthetic construct
ENMSVCVADFG

SEQ ID NO: 15684 - protein, 12 aa, synthetic construct
DLPPPVQAVCTP

SEQ ID NO: 15685 - protein, 9 aa, synthetic construct
EVDPRIQGE

SEQ ID NO: 15686 - protein, 9 aa, synthetic construct
NENGGITFF

SEQ ID NO: 15687 - protein, 10 aa, synthetic construct
APGPDGAPAK

SEQ ID NO: 15688 - protein, 8 aa, synthetic construct
HMAHISGK

SEQ ID NO: 15689 - protein, 10 aa, synthetic construct
TQEAIREHQM

SEQ ID NO: 15690 - protein, 10 aa, synthetic construct
EVVEDFSKKL

SEQ ID NO: 15691 - protein, 10 aa, synthetic construct
IDINDNTPQF

SEQ ID NO: 15692 - protein, 11 aa, synthetic construct
IDSDQNPIQLF

SEQ ID NO: 15693 - protein, 10 aa, synthetic construct
DIFEGIKDSQ

SEQ ID NO: 15694 - protein, 10 aa, synthetic construct
GSSRGMVSAY

SEQ ID NO: 15695 - protein, 11 aa, synthetic construct
EVFEVGRSDVT

SEQ ID NO: 15696 - protein, 9 aa, synthetic construct
IFDGFIVTL

SEQ ID NO: 15697 - protein, 10 aa, synthetic construct
EVLGLTQGCL

SEQ ID NO: 15698 - protein, 11 aa, synthetic construct
LDAKGQGCTAY

SEQ ID NO: 15699 - protein, 10 aa, synthetic construct
GKVGDMLLQY

SEQ ID NO: 15700 - protein, 11 aa, synthetic construct
LDYGAQPVRPE

SEQ ID NO: 15701 - protein, 9 aa, synthetic construct
DLFIPMQFG

SEQ ID NO: 15702 - protein, 11 aa, synthetic construct
ALTVNASMSRF

SEQ ID NO: 15703 - protein, 9 aa, synthetic construct
MFSIQTKDN

SEQ ID NO: 15704 - protein, 10 aa, synthetic construct
MLPANYIEFV

SEQ ID NO: 15705 - protein, 11 aa, synthetic construct
LDFGEPPPKKA

SEQ ID NO: 15706 - protein, 12 aa, synthetic construct
DIAAAYLLQGSF

SEQ ID NO: 15707 - protein, 10 aa, synthetic construct
SVRLAYMACM

SEQ ID NO: 15708 - protein, 9 aa, synthetic construct
REFVSLLKK

SEQ ID NO: 15709 - protein, 11 aa, synthetic construct
VEGLMTTVHSY

SEQ ID NO: 15710 - protein, 9 aa, synthetic construct
LYEAELLNY

SEQ ID NO: 15711 - protein, 12 aa, synthetic construct
QVENLITANATE

SEQ ID NO: 15712 - protein, 9 aa, synthetic construct
IISDMKGSY

SEQ ID NO: 15713 - protein, 10 aa, synthetic construct
SSNKSSLYSG

SEQ ID NO: 15714 - protein, 9 aa, synthetic construct
GSINYALEY

SEQ ID NO: 15715 - protein, 8 aa, synthetic construct
SEIFNKEY

SEQ ID NO: 15716 - protein, 10 aa, synthetic construct
ISMVSLGSYS

SEQ ID NO: 15717 - protein, 9 aa, synthetic construct
QYLADLHEA

SEQ ID NO: 15718 - protein, 10 aa, synthetic construct
YLTMYASSFT

SEQ ID NO: 15719 - protein, 10 aa, synthetic construct
VEFLQSAFGY

SEQ ID NO: 15720 - protein, 9 aa, synthetic construct
DLQHLSREE

SEQ ID NO: 15721 - protein, 9 aa, synthetic construct
EVGPSGAQF

SEQ ID NO: 15722 - protein, 10 aa, synthetic construct
VEHVDLGAYY

SEQ ID NO: 15723 - protein, 11 aa, synthetic construct
IDGHMYHSLYL

SEQ ID NO: 15724 - protein, 11 aa, synthetic construct
LDGLIETPTGY

SEQ ID NO: 15725 - protein, 10 aa, synthetic construct
VENLNLDDII

SEQ ID NO: 15726 - protein, 11 aa, synthetic construct
EVLDLQHNALT

SEQ ID NO: 15727 - protein, 11 aa, synthetic construct
EVLASLLDMVY

SEQ ID NO: 15728 - protein, 9 aa, synthetic construct
DLLQELTDI

SEQ ID NO: 15729 - protein, 10 aa, synthetic construct
DILQSEKITY

SEQ ID NO: 15730 - protein, 12 aa, synthetic construct
DILDVVGMLYVG

SEQ ID NO: 15731 - protein, 9 aa, synthetic construct
VDILDFLME

SEQ ID NO: 15732 - protein, 10 aa, synthetic construct
DILDLVVTSS

SEQ ID NO: 15733 - protein, 9 aa, synthetic construct
DIIEDVMVK

SEQ ID NO: 15734 - protein, 9 aa, synthetic construct
ELVEKIFMA

SEQ ID NO: 15735 - protein, 9 aa, synthetic construct
DLQLEIDQL

SEQ ID NO: 15736 - protein, 10 aa, synthetic construct
LDIEGLYPLY

SEQ ID NO: 15737 - protein, 11 aa, synthetic construct
EVLESIQSYFK

SEQ ID NO: 15738 - protein, 12 aa, synthetic construct
LDLEAVRGGASH

SEQ ID NO: 15739 - protein, 9 aa, synthetic construct
TIELDLISL

SEQ ID NO: 15740 - protein, 9 aa, synthetic construct
TGLDLEYVF

SEQ ID NO: 15741 - protein, 9 aa, synthetic construct
YTSEIVFLE

SEQ ID NO: 15742 - protein, 11 aa, synthetic construct
PSLPLCQGSSF

SEQ ID NO: 15743 - protein, 9 aa, synthetic construct
DLLGLGVRA

SEQ ID NO: 15744 - protein, 9 aa, synthetic construct
DLLGLDKFR

SEQ ID NO: 15745 - protein, 10 aa, synthetic construct
LQVGEVVTTI

SEQ ID NO: 15746 - protein, 10 aa, synthetic construct
DILGRPVGAA

SEQ ID NO: 15747 - protein, 9 aa, synthetic construct
LDLQDIKGY

SEQ ID NO: 15748 - protein, 10 aa, synthetic construct
ELVTIGIGQL

SEQ ID NO: 15749 - protein, 8 aa, synthetic construct
QEKLNEIV

SEQ ID NO: 15750 - protein, 10 aa, synthetic construct
ILDKVEEGAF

SEQ ID NO: 15751 - protein, 11 aa, synthetic construct
FLGGAVVSLQY

SEQ ID NO: 15752 - protein, 9 aa, synthetic construct
LDLIIIHQQ

SEQ ID NO: 15753 - protein, 10 aa, synthetic construct
DILNFVDDLE

SEQ ID NO: 15754 - protein, 10 aa, synthetic construct
LVENLRGALK

SEQ ID NO: 15755 - protein, 10 aa, synthetic construct
DLQVTVLAGG

SEQ ID NO: 15756 - protein, 9 aa, synthetic construct
LDLIKAVHV

SEQ ID NO: 15757 - protein, 11 aa, synthetic construct
DIPGTLNGLYL

SEQ ID NO: 15758 - protein, 10 aa, synthetic construct
IDILPSGLAF

SEQ ID NO: 15759 - protein, 9 aa, synthetic construct
IDINMADKY

SEQ ID NO: 15760 - protein, 9 aa, synthetic construct
LDLPREAFE

SEQ ID NO: 15761 - protein, 10 aa, synthetic construct
IDIPSGWDVE

SEQ ID NO: 15762 - protein, 9 aa, synthetic construct
LDLERESPF

SEQ ID NO: 15763 - protein, 9 aa, synthetic construct
LLDSLPNLV

SEQ ID NO: 15764 - protein, 8 aa, synthetic construct
IDLKYFPY

SEQ ID NO: 15765 - protein, 9 aa, synthetic construct
GMLTVNDVR

SEQ ID NO: 15766 - protein, 11 aa, synthetic construct
VSVASTGTPAM

SEQ ID NO: 15767 - protein, 10 aa, synthetic construct
VEILGFSEAK

SEQ ID NO: 15768 - protein, 9 aa, synthetic construct
LDLEKSLQF

SEQ ID NO: 15769 - protein, 10 aa, synthetic construct
EVLDSAMQAF

SEQ ID NO: 15770 - protein, 10 aa, synthetic construct
PSIVITLANF

SEQ ID NO: 15771 - protein, 10 aa, synthetic construct
LAGIDARGVY

SEQ ID NO: 15772 - protein, 10 aa, synthetic construct
DLLDSMTGVF

SEQ ID NO: 15773 - protein, 10 aa, synthetic construct
EVLDTNDNPP

SEQ ID NO: 15774 - protein, 10 aa, synthetic construct
DLIDIAMYSG

SEQ ID NO: 15775 - protein, 9 aa, synthetic construct
VELLHSGKL

SEQ ID NO: 15776 - protein, 9 aa, synthetic construct
LEVSYIKAV

SEQ ID NO: 15777 - protein, 9 aa, synthetic construct
LDLQYRHMV

SEQ ID NO: 15778 - protein, 9 aa, synthetic construct
VEISSKEYL

SEQ ID NO: 15779 - protein, 9 aa, synthetic construct
LSLDSSLVE

SEQ ID NO: 15780 - protein, 10 aa, synthetic construct
VELSYAKNGQ

SEQ ID NO: 15781 - protein, 11 aa, synthetic construct
LDLLAPPGSPV

SEQ ID NO: 15782 - protein, 9 aa, synthetic construct
LEVRLFPQL

SEQ ID NO: 15783 - protein, 8 aa, synthetic construct
IDLQQYKI

SEQ ID NO: 15784 - protein, 12 aa, synthetic construct
NNLSINTVREVD

SEQ ID NO: 15785 - protein, 8 aa, synthetic construct
DKIEALQN

SEQ ID NO: 15786 - protein, 12 aa, synthetic construct
SGVDLELVGSGY

SEQ ID NO: 15787 - protein, 9 aa, synthetic construct
EVKIAYINF

SEQ ID NO: 15788 - protein, 10 aa, synthetic construct
EVSLAALKSF

SEQ ID NO: 15789 - protein, 8 aa, synthetic construct
FLKCLIEL

SEQ ID NO: 15790 - protein, 9 aa, synthetic construct
IDKLPFDKY

SEQ ID NO: 15791 - protein, 10 aa, synthetic construct
PQLTLVLAIM

SEQ ID NO: 15792 - protein, 9 aa, synthetic construct
QLLKSLPEL

SEQ ID NO: 15793 - protein, 8 aa, synthetic construct
LDRFRRAF

SEQ ID NO: 15794 - protein, 8 aa, synthetic construct
EVVRRKMF

SEQ ID NO: 15795 - protein, 10 aa, synthetic construct
EVDSVALSLY

SEQ ID NO: 15796 - protein, 9 aa, synthetic construct
LDDLFLHTL

SEQ ID NO: 15797 - protein, 11 aa, synthetic construct
LDLDVAKETVM

SEQ ID NO: 15798 - protein, 9 aa, synthetic construct
DEQIVVMMY

SEQ ID NO: 15799 - protein, 9 aa, synthetic construct
DGYIEVIGF

SEQ ID NO: 15800 - protein, 10 aa, synthetic construct
SFVHNGASYY

SEQ ID NO: 15801 - protein, 9 aa, synthetic construct
VEVAIRLLY

SEQ ID NO: 15802 - protein, 9 aa, synthetic construct
EVLLENLRN

SEQ ID NO: 15803 - protein, 9 aa, synthetic construct
LGKITALDL

SEQ ID NO: 15804 - protein, 9 aa, synthetic construct
VEINKKGKA

SEQ ID NO: 15805 - protein, 10 aa, synthetic construct
DLLNNHILKS

SEQ ID NO: 15806 - protein, 10 aa, synthetic construct
EVIAGKAPEY

SEQ ID NO: 15807 - protein, 9 aa, synthetic construct
DLREQLGAL

SEQ ID NO: 15808 - protein, 8 aa, synthetic construct
DLIQERQL

SEQ ID NO: 15809 - protein, 9 aa, synthetic construct
DILQSYRFI

SEQ ID NO: 15810 - protein, 9 aa, synthetic construct
SIIDFTVTM

SEQ ID NO: 15811 - protein, 10 aa, synthetic construct
VDKGQPIFPS

SEQ ID NO: 15812 - protein, 9 aa, synthetic construct
IDMDFVRFI

SEQ ID NO: 15813 - protein, 9 aa, synthetic construct
EVMEPTWHI

SEQ ID NO: 15814 - protein, 10 aa, synthetic construct
DLMEYSLSIS

SEQ ID NO: 15815 - protein, 10 aa, synthetic construct
FPDTRVAGTQ

SEQ ID NO: 15816 - protein, 9 aa, synthetic construct
DIPCRRTWL

SEQ ID NO: 15817 - protein, 9 aa, synthetic construct
VLAVDNILY

SEQ ID NO: 15818 - protein, 10 aa, synthetic construct
DPTGTWKFTY

SEQ ID NO: 15819 - protein, 9 aa, synthetic construct
GDLQVLSYM

SEQ ID NO: 15820 - protein, 9 aa, synthetic construct
QFLKDNMAY

SEQ ID NO: 15821 - protein, 12 aa, synthetic construct
SDAAELEGLSQP

SEQ ID NO: 15822 - protein, 11 aa, synthetic construct
DLPDAMKPHEI

SEQ ID NO: 15823 - protein, 10 aa, synthetic construct
MAYSSSNSDI

SEQ ID NO: 15824 - protein, 8 aa, synthetic construct
VEPKTEPA

SEQ ID NO: 15825 - protein, 8 aa, synthetic construct
FSQSFREV

SEQ ID NO: 15826 - protein, 8 aa, synthetic construct
EVPQAPAL

SEQ ID NO: 15827 - protein, 9 aa, synthetic construct
DLDLDHPGF

SEQ ID NO: 15828 - protein, 11 aa, synthetic construct
YLDKLSSSSCT

SEQ ID NO: 15829 - protein, 10 aa, synthetic construct
VEQPASKLAR

SEQ ID NO: 15830 - protein, 9 aa, synthetic construct
YSVVNVLPE

SEQ ID NO: 15831 - protein, 9 aa, synthetic construct
EYSQDLDAY

SEQ ID NO: 15832 - protein, 10 aa, synthetic construct
SLANGELVVY

SEQ ID NO: 15833 - protein, 10 aa, synthetic construct
TMATAVLIGY

SEQ ID NO: 15834 - protein, 11 aa, synthetic construct
FSSQVAQGMAF

SEQ ID NO: 15835 - protein, 8 aa, synthetic construct
TIQEVFLY

SEQ ID NO: 15836 - protein, 10 aa, synthetic construct
EVSARSPSRP

SEQ ID NO: 15837 - protein, 9 aa, synthetic construct
EVSRDSSLL

SEQ ID NO: 15838 - protein, 9 aa, synthetic construct
LDTLLDGTY

SEQ ID NO: 15839 - protein, 8 aa, synthetic construct
EVIKQSAY

SEQ ID NO: 15840 - protein, 8 aa, synthetic construct
LDEKIAKY

SEQ ID NO: 15841 - protein, 9 aa, synthetic construct
IDFLPSTQF

SEQ ID NO: 15842 - protein, 9 aa, synthetic construct
LQALDLIME

SEQ ID NO: 15843 - protein, 10 aa, synthetic construct
VESPVAIHQP

SEQ ID NO: 15844 - protein, 11 aa, synthetic construct
LDSGFSGNLAF

SEQ ID NO: 15845 - protein, 9 aa, synthetic construct
EVDPRGCPF

SEQ ID NO: 15846 - protein, 10 aa, synthetic construct
PAESSVPPVT

SEQ ID NO: 15847 - protein, 9 aa, synthetic construct
VMEVTEAPE

SEQ ID NO: 15848 - protein, 9 aa, synthetic construct
VEVTLSYKS

SEQ ID NO: 15849 - protein, 9 aa, synthetic construct
TAEVLLSAF

SEQ ID NO: 15850 - protein, 9 aa, synthetic construct
VLASIEVLY

SEQ ID NO: 15851 - protein, 10 aa, synthetic construct
EVTWHGKGNE

SEQ ID NO: 15852 - protein, 10 aa, synthetic construct
GSVSSSSQQY

SEQ ID NO: 15853 - protein, 8 aa, synthetic construct
DLDTFQYQ

SEQ ID NO: 15854 - protein, 9 aa, synthetic construct
FDLESSLFY

SEQ ID NO: 15855 - protein, 9 aa, synthetic construct
LTVDEIASF

SEQ ID NO: 15856 - protein, 10 aa, synthetic construct
DITETSINGH

SEQ ID NO: 15857 - protein, 9 aa, synthetic construct
SIEEILSFQ

SEQ ID NO: 15858 - protein, 10 aa, synthetic construct
HLSALLDPEV

SEQ ID NO: 15859 - protein, 9 aa, synthetic construct
DITILEVKH

SEQ ID NO: 15860 - protein, 10 aa, synthetic construct
TMGYSVTAPE

SEQ ID NO: 15861 - protein, 9 aa, synthetic construct
FLNVTPNVE

SEQ ID NO: 15862 - protein, 9 aa, synthetic construct
MRQSLFPAG

SEQ ID NO: 15863 - protein, 9 aa, synthetic construct
YESLYDALN

SEQ ID NO: 15864 - protein, 10 aa, synthetic construct
VVEAVEVTMG

SEQ ID NO: 15865 - protein, 10 aa, synthetic construct
VIDAMRSQLG

SEQ ID NO: 15866 - protein, 9 aa, synthetic construct
EVVLEGKFS

SEQ ID NO: 15867 - protein, 10 aa, synthetic construct
EVLGGEFLKY

SEQ ID NO: 15868 - protein, 9 aa, synthetic construct
EVDLDELIL

SEQ ID NO: 15869 - protein, 11 aa, synthetic construct
YTPDLLPNGAD

SEQ ID NO: 15870 - protein, 11 aa, synthetic construct
VEVDSSSASTT

SEQ ID NO: 15871 - protein, 9 aa, synthetic construct
LDVKINENV

SEQ ID NO: 15872 - protein, 10 aa, synthetic construct
DLVRQGEPTP

SEQ ID NO: 15873 - protein, 10 aa, synthetic construct
DIVDAIYQMV

SEQ ID NO: 15874 - protein, 9 aa, synthetic construct
LDVDEIEKY

SEQ ID NO: 15875 - protein, 9 aa, synthetic construct
GTVEDLLAF

SEQ ID NO: 15876 - protein, 10 aa, synthetic construct
LDVILIAVSY

SEQ ID NO: 15877 - protein, 10 aa, synthetic construct
VAGLEDVQVY

SEQ ID NO: 15878 - protein, 10 aa, synthetic construct
LDGGELIVNY

SEQ ID NO: 15879 - protein, 11 aa, synthetic construct
IDVEALQVAFG

SEQ ID NO: 15880 - protein, 9 aa, synthetic construct
DLRDLLLFL

SEQ ID NO: 15881 - protein, 9 aa, synthetic construct
VEKKKEPSV

SEQ ID NO: 15882 - protein, 10 aa, synthetic construct
LDAGNIKLTF

SEQ ID NO: 15883 - protein, 9 aa, synthetic construct
IDVQTETVY

SEQ ID NO: 15884 - protein, 10 aa, synthetic construct
TDIAAEQLSY

SEQ ID NO: 15885 - protein, 9 aa, synthetic construct
LDVAVKDNK

SEQ ID NO: 15886 - protein, 9 aa, synthetic construct
LVDGLFLLR

SEQ ID NO: 15887 - protein, 11 aa, synthetic construct
DIVDELATSVY

SEQ ID NO: 15888 - protein, 10 aa, synthetic construct
EVVEKACRSY

SEQ ID NO: 15889 - protein, 10 aa, synthetic construct
VEVMMARRDD

SEQ ID NO: 15890 - protein, 8 aa, synthetic construct
VDVGLYQY

SEQ ID NO: 15891 - protein, 11 aa, synthetic construct
VEVGVDSGPKS

SEQ ID NO: 15892 - protein, 9 aa, synthetic construct
LFFGLLLFY

SEQ ID NO: 15893 - protein, 9 aa, synthetic construct
PNVNLRNYK

SEQ ID NO: 15894 - protein, 9 aa, synthetic construct
KVRLDILIL

SEQ ID NO: 15895 - protein, 9 aa, synthetic construct
RGRGRCPGF

SEQ ID NO: 15896 - protein, 11 aa, synthetic construct
LDVDLPEDAPL

SEQ ID NO: 15897 - protein, 8 aa, synthetic construct
QEIKEQEY

SEQ ID NO: 15898 - protein, 9 aa, synthetic construct
DIVSSVRRP

SEQ ID NO: 15899 - protein, 9 aa, synthetic construct
LVSELTPLT

SEQ ID NO: 15900 - protein, 9 aa, synthetic construct
TVIDVFYQY

SEQ ID NO: 15901 - protein, 11 aa, synthetic construct
VIGDLGVGKTS

SEQ ID NO: 15902 - protein, 11 aa, synthetic construct
TMQSATGIQYS

SEQ ID NO: 15903 - protein, 9 aa, synthetic construct
QVDDRFGAY

SEQ ID NO: 15904 - protein, 10 aa, synthetic construct
FQDYDNMDFE

SEQ ID NO: 15905 - protein, 10 aa, synthetic construct
IDYDTWMLSG

SEQ ID NO: 15906 - protein, 9 aa, synthetic construct
YGDLEAILY

SEQ ID NO: 15907 - protein, 9 aa, synthetic construct
VFDADTLLY

SEQ ID NO: 15908 - protein, 10 aa, synthetic construct
EVYENQGRDT

SEQ ID NO: 15909 - protein, 10 aa, synthetic construct
SMVSTQLTEF

SEQ ID NO: 15910 - protein, 9 aa, synthetic construct
MEIPSEHLR

SEQ ID NO: 15911 - protein, 10 aa, synthetic construct
LDFVMISVMG

SEQ ID NO: 15912 - protein, 10 aa, synthetic construct
VEVQNKPMIE

SEQ ID NO: 15913 - protein, 9 aa, synthetic construct
YNPKMSLDI

SEQ ID NO: 15914 - protein, 10 aa, synthetic construct
VEFSSTVVEY

SEQ ID NO: 15915 - protein, 11 aa, synthetic construct
PFENGQYLDIY

SEQ ID NO: 15916 - protein, 10 aa, synthetic construct
DLTSFAAEAI

SEQ ID NO: 15917 - protein, 11 aa, synthetic construct
HMIMHNGDGTY

SEQ ID NO: 15918 - protein, 11 aa, synthetic construct
EVMVPLAGVDP

SEQ ID NO: 15919 - protein, 10 aa, synthetic construct
PPPYDMKAYY

SEQ ID NO: 15920 - protein, 12 aa, synthetic construct
DLMPDISQSVLD

SEQ ID NO: 15921 - protein, 9 aa, synthetic construct
LPYPDILSF

SEQ ID NO: 15922 - protein, 9 aa, synthetic construct
SYSVEMPTV

SEQ ID NO: 15923 - protein, 9 aa, synthetic construct
LSDMYPSTV

SEQ ID NO: 15924 - protein, 10 aa, synthetic construct
EVMATARNLS

SEQ ID NO: 15925 - protein, 9 aa, synthetic construct
VWEDQLSYL

SEQ ID NO: 15926 - protein, 8 aa, synthetic construct
VEYGFQVK

SEQ ID NO: 15927 - protein, 13 aa, synthetic construct
AGPSAGAAGSSTL

SEQ ID NO: 15928 - protein, 9 aa, synthetic construct
EYLDFIKEV

SEQ ID NO: 15929 - protein, 10 aa, synthetic construct
FVAEFSVPLL

SEQ ID NO: 15930 - protein, 10 aa, synthetic construct
SIFFIGPNQF

SEQ ID NO: 15931 - protein, 9 aa, synthetic construct
LEYLEKKAK

SEQ ID NO: 15932 - protein, 11 aa, synthetic construct
WLGRSFLLAGF

SEQ ID NO: 15933 - protein, 10 aa, synthetic construct
LEYLTAEILE

SEQ ID NO: 15934 - protein, 9 aa, synthetic construct
EYILDKISK

SEQ ID NO: 15935 - protein, 10 aa, synthetic construct
SDEELSQYLL

SEQ ID NO: 15936 - protein, 10 aa, synthetic construct
METRKQSNYE

SEQ ID NO: 15937 - protein, 10 aa, synthetic construct
SPQDLRMFYE

SEQ ID NO: 15938 - protein, 13 aa, synthetic construct
ELGSPHGVGGGLF

SEQ ID NO: 15939 - protein, 9 aa, synthetic construct
NVEYDTYKP

SEQ ID NO: 15940 - protein, 11 aa, synthetic construct
YENVESELRFF

SEQ ID NO: 15941 - protein, 10 aa, synthetic construct
EYVHSWLSIL

SEQ ID NO: 15942 - protein, 10 aa, synthetic construct
QMQDFGYVIL

SEQ ID NO: 15943 - protein, 8 aa, synthetic construct
EMIVLKMV

SEQ ID NO: 15944 - protein, 9 aa, synthetic construct
RMTISRLVL

SEQ ID NO: 15945 - protein, 8 aa, synthetic construct
EMLLKWMA

SEQ ID NO: 15946 - protein, 8 aa, synthetic construct
VEMTLSIS

SEQ ID NO: 15947 - protein, 8 aa, synthetic construct
DGEDAKSE

SEQ ID NO: 15948 - protein, 9 aa, synthetic construct
ENGDKSEAQ

SEQ ID NO: 15949 - protein, 8 aa, synthetic construct
LFQELSVL

SEQ ID NO: 15950 - protein, 9 aa, synthetic construct
FAAFSLMTI

SEQ ID NO: 15951 - protein, 9 aa, synthetic construct
FALAFVKLM

SEQ ID NO: 15952 - protein, 10 aa, synthetic construct
AAPHHPFSLE

SEQ ID NO: 15953 - protein, 8 aa, synthetic construct
EFVQQYAF

SEQ ID NO: 15954 - protein, 9 aa, synthetic construct
QQVDVTREN

SEQ ID NO: 15955 - protein, 10 aa, synthetic construct
LDITSLASDS

SEQ ID NO: 15956 - protein, 8 aa, synthetic construct
AFCEKNFL

SEQ ID NO: 15957 - protein, 9 aa, synthetic construct
KLSFSSCAE

SEQ ID NO: 15958 - protein, 9 aa, synthetic construct
SGKDAWFAF

SEQ ID NO: 15959 - protein, 8 aa, synthetic construct
FQFDVVLY

SEQ ID NO: 15960 - protein, 9 aa, synthetic construct
FLSSFPAVY

SEQ ID NO: 15961 - protein, 10 aa, synthetic construct
PASSAFLAEF

SEQ ID NO: 15962 - protein, 10 aa, synthetic construct
FADNSGIDII

SEQ ID NO: 15963 - protein, 9 aa, synthetic construct
LMSLVTIVF

SEQ ID NO: 15964 - protein, 9 aa, synthetic construct
VTMGETVSF

SEQ ID NO: 15965 - protein, 9 aa, synthetic construct
TPYMVQPEY

SEQ ID NO: 15966 - protein, 9 aa, synthetic construct
IFAFDEIVA

SEQ ID NO: 15967 - protein, 9 aa, synthetic construct
KSSCTTVYN

SEQ ID NO: 15968 - protein, 10 aa, synthetic construct
NASTYSAIGY

SEQ ID NO: 15969 - protein, 10 aa, synthetic construct
ETDRGMSAEY

SEQ ID NO: 15970 - protein, 9 aa, synthetic construct
AEECTKEEY

SEQ ID NO: 15971 - protein, 9 aa, synthetic construct
EQGMEKEEY

SEQ ID NO: 15972 - protein, 10 aa, synthetic construct
EPPNSDLHPM

SEQ ID NO: 15973 - protein, 9 aa, synthetic construct
FAFPEAREV

SEQ ID NO: 15974 - protein, 9 aa, synthetic construct
IIDHASVGI

SEQ ID NO: 15975 - protein, 8 aa, synthetic construct
FAADHLTR

SEQ ID NO: 15976 - protein, 8 aa, synthetic construct
IHPSPLED

SEQ ID NO: 15977 - protein, 9 aa, synthetic construct
EGEWNGVMY

SEQ ID NO: 15978 - protein, 9 aa, synthetic construct
FLIVFSIEA

SEQ ID NO: 15979 - protein, 11 aa, synthetic construct
AFIFLIAGYEI

SEQ ID NO: 15980 - protein, 11 aa, synthetic construct
FALEDQPVKLP

SEQ ID NO: 15981 - protein, 10 aa, synthetic construct
ELGSGEPGEA

SEQ ID NO: 15982 - protein, 9 aa, synthetic construct
FALSGPLFL

SEQ ID NO: 15983 - protein, 8 aa, synthetic construct
FLMHPEEL

SEQ ID NO: 15984 - protein, 9 aa, synthetic construct
LMKKRSVTI

SEQ ID NO: 15985 - protein, 11 aa, synthetic construct
VQYSAVSSFVF

SEQ ID NO: 15986 - protein, 12 aa, synthetic construct
AFLTIKGAGHMV

SEQ ID NO: 15987 - protein, 12 aa, synthetic construct
AFITHSGMLVVA

SEQ ID NO: 15988 - protein, 9 aa, synthetic construct
AGLGSAFLY

SEQ ID NO: 15989 - protein, 9 aa, synthetic construct
IDHPVSLTG

SEQ ID NO: 15990 - protein, 10 aa, synthetic construct
FAGQTPDTTY

SEQ ID NO: 15991 - protein, 11 aa, synthetic construct
PGPPPNPGAVY

SEQ ID NO: 15992 - protein, 10 aa, synthetic construct
AFNVEGGWAE

SEQ ID NO: 15993 - protein, 9 aa, synthetic construct
SNSEKDIMA

SEQ ID NO: 15994 - protein, 10 aa, synthetic construct
ASQSAEITGM

SEQ ID NO: 15995 - protein, 9 aa, synthetic construct
LFAPGDLPE

SEQ ID NO: 15996 - protein, 8 aa, synthetic construct
FAISNRFK

SEQ ID NO: 15997 - protein, 8 aa, synthetic construct
MKILIMFA

SEQ ID NO: 15998 - protein, 8 aa, synthetic construct
RYAQVKAF

SEQ ID NO: 15999 - protein, 9 aa, synthetic construct
AFPPAMNES

SEQ ID NO: 16000 - protein, 9 aa, synthetic construct
FAPSPFGTL

SEQ ID NO: 16001 - protein, 8 aa, synthetic construct
FAMLSSVM

SEQ ID NO: 16002 - protein, 10 aa, synthetic construct
FAGLQGLSFP

SEQ ID NO: 16003 - protein, 9 aa, synthetic construct
ELRAMIEEF

SEQ ID NO: 16004 - protein, 9 aa, synthetic construct
RMIGADVEF

SEQ ID NO: 16005 - protein, 9 aa, synthetic construct
FAADGLSTY

SEQ ID NO: 16006 - protein, 9 aa, synthetic construct
SVETGFNVI

SEQ ID NO: 16007 - protein, 9 aa, synthetic construct
VDTAFKNGL

SEQ ID NO: 16008 - protein, 9 aa, synthetic construct
FAVPNPKQV

SEQ ID NO: 16009 - protein, 9 aa, synthetic construct
VPQRKGPAF

SEQ ID NO: 16010 - protein, 10 aa, synthetic construct
EAGAGRSPEV

SEQ ID NO: 16011 - protein, 12 aa, synthetic construct
SATAPTYIANAI

SEQ ID NO: 16012 - protein, 8 aa, synthetic construct
SQSEKQTY

SEQ ID NO: 16013 - protein, 10 aa, synthetic construct
PASSGGFAIW

SEQ ID NO: 16014 - protein, 12 aa, synthetic construct
VGPCEEKAGAAE

SEQ ID NO: 16015 - protein, 9 aa, synthetic construct
VTGEEFVLF

SEQ ID NO: 16016 - protein, 11 aa, synthetic construct
ETAAQENASEY

SEQ ID NO: 16017 - protein, 9 aa, synthetic construct
SGMMRYIAF

SEQ ID NO: 16018 - protein, 12 aa, synthetic construct
FAGPEAGGSGEL

SEQ ID NO: 16019 - protein, 12 aa, synthetic construct
AFEMPLTADPTL

SEQ ID NO: 16020 - protein, 13 aa, synthetic construct
FAPSSNGTPDVTL

SEQ ID NO: 16021 - protein, 10 aa, synthetic construct
FAYDNVSAVY

SEQ ID NO: 16022 - protein, 9 aa, synthetic construct
LSVFMSSAL

SEQ ID NO: 16023 - protein, 10 aa, synthetic construct
ECHEDLNLVS

SEQ ID NO: 16024 - protein, 9 aa, synthetic construct
CPICYSIFE

SEQ ID NO: 16025 - protein, 9 aa, synthetic construct
SIFCPEYSI

SEQ ID NO: 16026 - protein, 10 aa, synthetic construct
FCSPSAFGAV

SEQ ID NO: 16027 - protein, 9 aa, synthetic construct
DMSFCRLEF

SEQ ID NO: 16028 - protein, 8 aa, synthetic construct
FDPGLKSK

SEQ ID NO: 16029 - protein, 7 aa, synthetic construct
FDPKKTR

SEQ ID NO: 16030 - protein, 8 aa, synthetic construct
DVHAFSKF

SEQ ID NO: 16031 - protein, 8 aa, synthetic construct
LFESKAEL

SEQ ID NO: 16032 - protein, 9 aa, synthetic construct
LSQYFDAVK

SEQ ID NO: 16033 - protein, 8 aa, synthetic construct
FDVARISP

SEQ ID NO: 16034 - protein, 9 aa, synthetic construct
FDVHHVESL

SEQ ID NO: 16035 - protein, 11 aa, synthetic construct
FDLMDAKARAD

SEQ ID NO: 16036 - protein, 11 aa, synthetic construct
NGHVMKMKHGE

SEQ ID NO: 16037 - protein, 8 aa, synthetic construct
FDVCTVSR

SEQ ID NO: 16038 - protein, 9 aa, synthetic construct
TVAQPSEMP

SEQ ID NO: 16039 - protein, 10 aa, synthetic construct
QVLYVSGNSA

SEQ ID NO: 16040 - protein, 10 aa, synthetic construct
FEFVEPVSIA

SEQ ID NO: 16041 - protein, 9 aa, synthetic construct
LEQFVAILP

SEQ ID NO: 16042 - protein, 10 aa, synthetic construct
FEGEIGKGNL

SEQ ID NO: 16043 - protein, 9 aa, synthetic construct
NDGSLTSLK

SEQ ID NO: 16044 - protein, 9 aa, synthetic construct
FEDLFKKFN

SEQ ID NO: 16045 - protein, 9 aa, synthetic construct
EFSKEAYTA

SEQ ID NO: 16046 - protein, 9 aa, synthetic construct
FEFYEEILT

SEQ ID NO: 16047 - protein, 9 aa, synthetic construct
LVLKTNFEE

SEQ ID NO: 16048 - protein, 10 aa, synthetic construct
DPQDPSTFLP

SEQ ID NO: 16049 - protein, 8 aa, synthetic construct
VENFVALA

SEQ ID NO: 16050 - protein, 8 aa, synthetic construct
LFEIPVKE

SEQ ID NO: 16051 - protein, 9 aa, synthetic construct
FRLESAILP

SEQ ID NO: 16052 - protein, 9 aa, synthetic construct
ATTEYAEFL

SEQ ID NO: 16053 - protein, 9 aa, synthetic construct
ILTVPESQK

SEQ ID NO: 16054 - protein, 12 aa, synthetic construct
FELGPPVMLDAA

SEQ ID NO: 16055 - protein, 12 aa, synthetic construct
GNLGGSVTFECA

SEQ ID NO: 16056 - protein, 9 aa, synthetic construct
VFKEAYLGP

SEQ ID NO: 16057 - protein, 9 aa, synthetic construct
PFELDTSVT

SEQ ID NO: 16058 - protein, 11 aa, synthetic construct
EPPPNPAPAAP

SEQ ID NO: 16059 - protein, 11 aa, synthetic construct
SAEAAKKMLEE

SEQ ID NO: 16060 - protein, 8 aa, synthetic construct
VFWEIGKV

SEQ ID NO: 16061 - protein, 8 aa, synthetic construct
RFEELGVK

SEQ ID NO: 16062 - protein, 12 aa, synthetic construct
QEPSNGISSDPT

SEQ ID NO: 16063 - protein, 10 aa, synthetic construct
TDAMTTAVAL

SEQ ID NO: 16064 - protein, 9 aa, synthetic construct
EFSSLVEVR

SEQ ID NO: 16065 - protein, 9 aa, synthetic construct
TYEGPDELP

SEQ ID NO: 16066 - protein, 9 aa, synthetic construct
QRSCSFTFP

SEQ ID NO: 16067 - protein, 9 aa, synthetic construct
VDLYKSLQI

SEQ ID NO: 16068 - protein, 9 aa, synthetic construct
DLFVGEAPE

SEQ ID NO: 16069 - protein, 12 aa, synthetic construct
AAAQLMTVTTLE

SEQ ID NO: 16070 - protein, 11 aa, synthetic construct
AESLGGFESLA

SEQ ID NO: 16071 - protein, 10 aa, synthetic construct
EFQISEGSRV

SEQ ID NO: 16072 - protein, 9 aa, synthetic construct
FEYNKDGIA

SEQ ID NO: 16073 - protein, 9 aa, synthetic construct
TFRPTMEEF

SEQ ID NO: 16074 - protein, 9 aa, synthetic construct
EFMFINDLE

SEQ ID NO: 16075 - protein, 8 aa, synthetic construct
YELEFLEE

SEQ ID NO: 16076 - protein, 8 aa, synthetic construct
HRCVIHSV

SEQ ID NO: 16077 - protein, 11 aa, synthetic construct
AAAALQLYGNS

SEQ ID NO: 16078 - protein, 8 aa, synthetic construct
LYRNSIEF

SEQ ID NO: 16079 - protein, 9 aa, synthetic construct
FELFADKFP

SEQ ID NO: 16080 - protein, 11 aa, synthetic construct
RVGMEFAVTQA

SEQ ID NO: 16081 - protein, 10 aa, synthetic construct
QFMGQAFKSI

SEQ ID NO: 16082 - protein, 10 aa, synthetic construct
EGHEDVAAFL

SEQ ID NO: 16083 - protein, 8 aa, synthetic construct
YMDVLMPL

SEQ ID NO: 16084 - protein, 9 aa, synthetic construct
YEERSSVTI

SEQ ID NO: 16085 - protein, 9 aa, synthetic construct
SCCFISYSL

SEQ ID NO: 16086 - protein, 9 aa, synthetic construct
FFDLNPKYD

SEQ ID NO: 16087 - protein, 7 aa, synthetic construct
FQNWDTL

SEQ ID NO: 16088 - protein, 10 aa, synthetic construct
MTASNWTLVM

SEQ ID NO: 16089 - protein, 10 aa, synthetic construct
FMTSGLSESL

SEQ ID NO: 16090 - protein, 9 aa, synthetic construct
FFDIRLAPV

SEQ ID NO: 16091 - protein, 10 aa, synthetic construct
NGHTHFGNDN

SEQ ID NO: 16092 - protein, 11 aa, synthetic construct
GGGTEAEESFE

SEQ ID NO: 16093 - protein, 11 aa, synthetic construct
FFFDGMKGNGI

SEQ ID NO: 16094 - protein, 11 aa, synthetic construct
DPSVPKIVAFE

SEQ ID NO: 16095 - protein, 8 aa, synthetic construct
KMEYMTDY

SEQ ID NO: 16096 - protein, 8 aa, synthetic construct
GTTDFFLL

SEQ ID NO: 16097 - protein, 8 aa, synthetic construct
FFEGIQYI

SEQ ID NO: 16098 - protein, 10 aa, synthetic construct
QSPQLEGMAE

SEQ ID NO: 16099 - protein, 11 aa, synthetic construct
TASTGTSLFSS

SEQ ID NO: 16100 - protein, 9 aa, synthetic construct
TGTTAIHFF

SEQ ID NO: 16101 - protein, 7 aa, synthetic construct
FFHKERM

SEQ ID NO: 16102 - protein, 9 aa, synthetic construct
FFLLCAWSI

SEQ ID NO: 16103 - protein, 10 aa, synthetic construct
FFLQFKPSIT

SEQ ID NO: 16104 - protein, 10 aa, synthetic construct
FPVKVYNLFT

SEQ ID NO: 16105 - protein, 11 aa, synthetic construct
FFLPKGTEVFP

SEQ ID NO: 16106 - protein, 10 aa, synthetic construct
FFIFSTIFFI

SEQ ID NO: 16107 - protein, 11 aa, synthetic construct
FFLQSLYSLTG

SEQ ID NO: 16108 - protein, 11 aa, synthetic construct
FFLLGNKSTSK

SEQ ID NO: 16109 - protein, 10 aa, synthetic construct
STSPSVALSK

SEQ ID NO: 16110 - protein, 8 aa, synthetic construct
QFGGYWIE

SEQ ID NO: 16111 - protein, 7 aa, synthetic construct
VQDCFYL

SEQ ID NO: 16112 - protein, 9 aa, synthetic construct
GDHLDLASY

SEQ ID NO: 16113 - protein, 8 aa, synthetic construct
FGGHRSLV

SEQ ID NO: 16114 - protein, 9 aa, synthetic construct
FGRDALPEL

SEQ ID NO: 16115 - protein, 9 aa, synthetic construct
FGEKLFSGV

SEQ ID NO: 16116 - protein, 9 aa, synthetic construct
FGVLQRKEI

SEQ ID NO: 16117 - protein, 8 aa, synthetic construct
FRALQFSL

SEQ ID NO: 16118 - protein, 8 aa, synthetic construct
FSKKPRSV

SEQ ID NO: 16119 - protein, 8 aa, synthetic construct
FGVLRQGI

SEQ ID NO: 16120 - protein, 8 aa, synthetic construct
FGDQCRII

SEQ ID NO: 16121 - protein, 10 aa, synthetic construct
FGGPGSFGGP

SEQ ID NO: 16122 - protein, 8 aa, synthetic construct
GFHLCPPW

SEQ ID NO: 16123 - protein, 8 aa, synthetic construct
VTEMKNSL

SEQ ID NO: 16124 - protein, 10 aa, synthetic construct
FGAGLGGNVK

SEQ ID NO: 16125 - protein, 8 aa, synthetic construct
DVYQVAKM

SEQ ID NO: 16126 - protein, 11 aa, synthetic construct
ASIWVTKFPGD

SEQ ID NO: 16127 - protein, 9 aa, synthetic construct
VFGTNVMVT

SEQ ID NO: 16128 - protein, 10 aa, synthetic construct
GFGEEFDEDE

SEQ ID NO: 16129 - protein, 8 aa, synthetic construct
WWYSVIYT

SEQ ID NO: 16130 - protein, 9 aa, synthetic construct
RRRCHTMAF

SEQ ID NO: 16131 - protein, 10 aa, synthetic construct
FHLHQGDILS

SEQ ID NO: 16132 - protein, 9 aa, synthetic construct
LCHDATPFI

SEQ ID NO: 16133 - protein, 11 aa, synthetic construct
KDKSRSPGIQK

SEQ ID NO: 16134 - protein, 9 aa, synthetic construct
FLASGLHPT

SEQ ID NO: 16135 - protein, 10 aa, synthetic construct
VTGGYPFEAY

SEQ ID NO: 16136 - protein, 9 aa, synthetic construct
EIKDVFAVY

SEQ ID NO: 16137 - protein, 9 aa, synthetic construct
FLKTVAQNY

SEQ ID NO: 16138 - protein, 9 aa, synthetic construct
TAEMLNYSV

SEQ ID NO: 16139 - protein, 11 aa, synthetic construct
FIDAPDSPATL

SEQ ID NO: 16140 - protein, 8 aa, synthetic construct
EFISTKSF

SEQ ID NO: 16141 - protein, 10 aa, synthetic construct
KFDTGSFVGG

SEQ ID NO: 16142 - protein, 9 aa, synthetic construct
FITITLMKI

SEQ ID NO: 16143 - protein, 10 aa, synthetic construct
FIHILMYSYY

SEQ ID NO: 16144 - protein, 10 aa, synthetic construct
FISLVGSRGL

SEQ ID NO: 16145 - protein, 9 aa, synthetic construct
FLLPSVIMI

SEQ ID NO: 16146 - protein, 9 aa, synthetic construct
FLLIPFDAL

SEQ ID NO: 16147 - protein, 10 aa, synthetic construct
FLITCRNGAG

SEQ ID NO: 16148 - protein, 9 aa, synthetic construct
YVDLRLKFL

SEQ ID NO: 16149 - protein, 8 aa, synthetic construct
FILKAMKF

SEQ ID NO: 16150 - protein, 9 aa, synthetic construct
FLEKENTAL

SEQ ID NO: 16151 - protein, 10 aa, synthetic construct
FINKASNSVL

SEQ ID NO: 16152 - protein, 9 aa, synthetic construct
FINVQTKKD

SEQ ID NO: 16153 - protein, 11 aa, synthetic construct
LFWTPEVSGGL

SEQ ID NO: 16154 - protein, 9 aa, synthetic construct
IFFSPVSVS

SEQ ID NO: 16155 - protein, 10 aa, synthetic construct
LMYLVTKPEI

SEQ ID NO: 16156 - protein, 10 aa, synthetic construct
QALGFLLSAL

SEQ ID NO: 16157 - protein, 9 aa, synthetic construct
FLGALWLAL

SEQ ID NO: 16158 - protein, 9 aa, synthetic construct
SEYTRALFL

SEQ ID NO: 16159 - protein, 10 aa, synthetic construct
FINVQEDIRP

SEQ ID NO: 16160 - protein, 10 aa, synthetic construct
IAGTKKRVIT

SEQ ID NO: 16161 - protein, 9 aa, synthetic construct
SKNNKRPEY

SEQ ID NO: 16162 - protein, 10 aa, synthetic construct
ILAFGTGVEF

SEQ ID NO: 16163 - protein, 9 aa, synthetic construct
ESLGHTSFL

SEQ ID NO: 16164 - protein, 9 aa, synthetic construct
FLLMLQSVK

SEQ ID NO: 16165 - protein, 9 aa, synthetic construct
ETDILFLIP

SEQ ID NO: 16166 - protein, 8 aa, synthetic construct
FLVPEIRW

SEQ ID NO: 16167 - protein, 9 aa, synthetic construct
FLWIHSQLE

SEQ ID NO: 16168 - protein, 10 aa, synthetic construct
EFPAGERIQF

SEQ ID NO: 16169 - protein, 9 aa, synthetic construct
IFGYRGVVL

SEQ ID NO: 16170 - protein, 10 aa, synthetic construct
FLRSGGMEAL

SEQ ID NO: 16171 - protein, 9 aa, synthetic construct
TRSLVTSFE

SEQ ID NO: 16172 - protein, 10 aa, synthetic construct
FKRAASAIEK

SEQ ID NO: 16173 - protein, 11 aa, synthetic construct
RGVHKIASTRF

SEQ ID NO: 16174 - protein, 9 aa, synthetic construct
FIDAFASPV

SEQ ID NO: 16175 - protein, 11 aa, synthetic construct
AFLADPSAFVA

SEQ ID NO: 16176 - protein, 8 aa, synthetic construct
NFIHMNLF

SEQ ID NO: 16177 - protein, 11 aa, synthetic construct
FIATYGPGTTI

SEQ ID NO: 16178 - protein, 9 aa, synthetic construct
FVVGGVTVS

SEQ ID NO: 16179 - protein, 9 aa, synthetic construct
FIALLMSYA

SEQ ID NO: 16180 - protein, 9 aa, synthetic construct
LAFLFPSSF

SEQ ID NO: 16181 - protein, 10 aa, synthetic construct
VGTGKVTVEY

SEQ ID NO: 16182 - protein, 9 aa, synthetic construct
IFANALREI

SEQ ID NO: 16183 - protein, 10 aa, synthetic construct
LFKEETKLQL

SEQ ID NO: 16184 - protein, 12 aa, synthetic construct
LFAGDPGLGPEE

SEQ ID NO: 16185 - protein, 9 aa, synthetic construct
DICTFVFSY

SEQ ID NO: 16186 - protein, 9 aa, synthetic construct
ILADIFVSM

SEQ ID NO: 16187 - protein, 11 aa, synthetic construct
LFDASSFGKDL

SEQ ID NO: 16188 - protein, 9 aa, synthetic construct
IFDFEDSYK

SEQ ID NO: 16189 - protein, 9 aa, synthetic construct
FLPCCLPPY

SEQ ID NO: 16190 - protein, 9 aa, synthetic construct
FDVIDNLII

SEQ ID NO: 16191 - protein, 10 aa, synthetic construct
FLDIPGQDNL

SEQ ID NO: 16192 - protein, 9 aa, synthetic construct
FIDEIDAIG

SEQ ID NO: 16193 - protein, 11 aa, synthetic construct
FIDTAGAMLQY

SEQ ID NO: 16194 - protein, 10 aa, synthetic construct
HKTEGDIFAI

SEQ ID NO: 16195 - protein, 10 aa, synthetic construct
GADLGDFLTL

SEQ ID NO: 16196 - protein, 9 aa, synthetic construct
SSEIQMMTL

SEQ ID NO: 16197 - protein, 8 aa, synthetic construct
LDRMCMTL

SEQ ID NO: 16198 - protein, 9 aa, synthetic construct
TDIMNTTMI

SEQ ID NO: 16199 - protein, 9 aa, synthetic construct
FIDERLLMY

SEQ ID NO: 16200 - protein, 10 aa, synthetic construct
FLDQVVGGLA

SEQ ID NO: 16201 - protein, 9 aa, synthetic construct
LPMGTALPL

SEQ ID NO: 16202 - protein, 9 aa, synthetic construct
LTDFIQEEF

SEQ ID NO: 16203 - protein, 9 aa, synthetic construct
FILNHVDQI

SEQ ID NO: 16204 - protein, 9 aa, synthetic construct
DVNTFDITV

SEQ ID NO: 16205 - protein, 10 aa, synthetic construct
FINHNGILSI

SEQ ID NO: 16206 - protein, 9 aa, synthetic construct
FLDKLHNEI

SEQ ID NO: 16207 - protein, 11 aa, synthetic construct
FILDDSLNGPP

SEQ ID NO: 16208 - protein, 9 aa, synthetic construct
FLDKYMPQF

SEQ ID NO: 16209 - protein, 9 aa, synthetic construct
FLDFYHSFL

SEQ ID NO: 16210 - protein, 9 aa, synthetic construct
LDTDFVESL

SEQ ID NO: 16211 - protein, 11 aa, synthetic construct
FIDSFVNVVSM

SEQ ID NO: 16212 - protein, 12 aa, synthetic construct
FIESSGTPHGLE

SEQ ID NO: 16213 - protein, 9 aa, synthetic construct
VFSETSPIL

SEQ ID NO: 16214 - protein, 8 aa, synthetic construct
FLDRCNHL

SEQ ID NO: 16215 - protein, 10 aa, synthetic construct
VTEEIFENPD

SEQ ID NO: 16216 - protein, 10 aa, synthetic construct
FLLLSIGPVP

SEQ ID NO: 16217 - protein, 9 aa, synthetic construct
FLEYNKSLY

SEQ ID NO: 16218 - protein, 8 aa, synthetic construct
FLNEYFDV

SEQ ID NO: 16219 - protein, 10 aa, synthetic construct
FLFGKMNPHA

SEQ ID NO: 16220 - protein, 10 aa, synthetic construct
FLFSSLMHGI

SEQ ID NO: 16221 - protein, 9 aa, synthetic construct
FFLELLRSP

SEQ ID NO: 16222 - protein, 9 aa, synthetic construct
FEPVVKAFL

SEQ ID NO: 16223 - protein, 9 aa, synthetic construct
KLLSAEFLE

SEQ ID NO: 16224 - protein, 8 aa, synthetic construct
NFVIFLMT

SEQ ID NO: 16225 - protein, 9 aa, synthetic construct
NVIVIFFIE

SEQ ID NO: 16226 - protein, 9 aa, synthetic construct
FLKKSMLLN

SEQ ID NO: 16227 - protein, 7 aa, synthetic construct
FLSWKMF

SEQ ID NO: 16228 - protein, 9 aa, synthetic construct
FIIITGFVK

SEQ ID NO: 16229 - protein, 10 aa, synthetic construct
QDPRYSPYTL

SEQ ID NO: 16230 - protein, 9 aa, synthetic construct
MNLNGWVEL

SEQ ID NO: 16231 - protein, 10 aa, synthetic construct
VLNMPALEWL

SEQ ID NO: 16232 - protein, 10 aa, synthetic construct
FLHIGSVITL

SEQ ID NO: 16233 - protein, 10 aa, synthetic construct
FILGQAKNAR

SEQ ID NO: 16234 - protein, 9 aa, synthetic construct
FIKLEQTFL

SEQ ID NO: 16235 - protein, 9 aa, synthetic construct
EKLVLEFTF

SEQ ID NO: 16236 - protein, 9 aa, synthetic construct
FIKPKLVTV

SEQ ID NO: 16237 - protein, 9 aa, synthetic construct
LIFLEALPE

SEQ ID NO: 16238 - protein, 10 aa, synthetic construct
FLLDKIESLS

SEQ ID NO: 16239 - protein, 9 aa, synthetic construct
FILALKDLL

SEQ ID NO: 16240 - protein, 9 aa, synthetic construct
FLKLKDIVG

SEQ ID NO: 16241 - protein, 9 aa, synthetic construct
IFIESGLRL

SEQ ID NO: 16242 - protein, 10 aa, synthetic construct
FLISSITMSV

SEQ ID NO: 16243 - protein, 10 aa, synthetic construct
FLLSAVYLGP

SEQ ID NO: 16244 - protein, 9 aa, synthetic construct
FLLDHLALI

SEQ ID NO: 16245 - protein, 10 aa, synthetic construct
LFLQALIPLA

SEQ ID NO: 16246 - protein, 11 aa, synthetic construct
AQVGQTPLRGV

SEQ ID NO: 16247 - protein, 12 aa, synthetic construct
LGARLGPSQGAV

SEQ ID NO: 16248 - protein, 11 aa, synthetic construct
GGKASQLGIFI

SEQ ID NO: 16249 - protein, 9 aa, synthetic construct
LLFPLLAKE

SEQ ID NO: 16250 - protein, 9 aa, synthetic construct
LYAIDQINK

SEQ ID NO: 16251 - protein, 9 aa, synthetic construct
IFSLEVQEL

SEQ ID NO: 16252 - protein, 9 aa, synthetic construct
IVNEDFLWN

SEQ ID NO: 16253 - protein, 9 aa, synthetic construct
QDYRTVYVL

SEQ ID NO: 16254 - protein, 8 aa, synthetic construct
FLPDFCFQ

SEQ ID NO: 16255 - protein, 9 aa, synthetic construct
NTDVKDFFL

SEQ ID NO: 16256 - protein, 9 aa, synthetic construct
FPLEGNPLF

SEQ ID NO: 16257 - protein, 9 aa, synthetic construct
FLPEWTGIA

SEQ ID NO: 16258 - protein, 9 aa, synthetic construct
NPVEGKLIF

SEQ ID NO: 16259 - protein, 8 aa, synthetic construct
FIPEKEVV

SEQ ID NO: 16260 - protein, 8 aa, synthetic construct
AEKPTLFL

SEQ ID NO: 16261 - protein, 12 aa, synthetic construct
FILPLALGGLGP

SEQ ID NO: 16262 - protein, 9 aa, synthetic construct
LFLAHGVTL

SEQ ID NO: 16263 - protein, 10 aa, synthetic construct
FIEGVVGPAL

SEQ ID NO: 16264 - protein, 10 aa, synthetic construct
LFLPRQPPMS

SEQ ID NO: 16265 - protein, 9 aa, synthetic construct
PGSESNLFI

SEQ ID NO: 16266 - protein, 9 aa, synthetic construct
FLPHLPSIA

SEQ ID NO: 16267 - protein, 10 aa, synthetic construct
IFPALVGRSI

SEQ ID NO: 16268 - protein, 10 aa, synthetic construct
FDAQEVLLSA

SEQ ID NO: 16269 - protein, 8 aa, synthetic construct
IFKMKCTL

SEQ ID NO: 16270 - protein, 9 aa, synthetic construct
FLQGLSEKP

SEQ ID NO: 16271 - protein, 9 aa, synthetic construct
VSLNTGEFI

SEQ ID NO: 16272 - protein, 9 aa, synthetic construct
LFQPVLEKI

SEQ ID NO: 16273 - protein, 11 aa, synthetic construct
IFQAAKGAGIS

SEQ ID NO: 16274 - protein, 10 aa, synthetic construct
IHQLIAPASY

SEQ ID NO: 16275 - protein, 10 aa, synthetic construct
ILTDFTGALQ

SEQ ID NO: 16276 - protein, 9 aa, synthetic construct
GIYISEALV

SEQ ID NO: 16277 - protein, 10 aa, synthetic construct
QSPPTGYSIL

SEQ ID NO: 16278 - protein, 9 aa, synthetic construct
ITLAYVNIG

SEQ ID NO: 16279 - protein, 10 aa, synthetic construct
TPSFSKTSNK

SEQ ID NO: 16280 - protein, 10 aa, synthetic construct
NIPVPETNYL

SEQ ID NO: 16281 - protein, 9 aa, synthetic construct
LAGYLTTLE

SEQ ID NO: 16282 - protein, 9 aa, synthetic construct
FILRCGLLL

SEQ ID NO: 16283 - protein, 11 aa, synthetic construct
DVGSKTTMRLF

SEQ ID NO: 16284 - protein, 11 aa, synthetic construct
FLTHHAQTSKT

SEQ ID NO: 16285 - protein, 9 aa, synthetic construct
LSPFSVSCI

SEQ ID NO: 16286 - protein, 8 aa, synthetic construct
FLLEQCTV

SEQ ID NO: 16287 - protein, 10 aa, synthetic construct
LFLPTGSHVL

SEQ ID NO: 16288 - protein, 9 aa, synthetic construct
FIVLTVLHT

SEQ ID NO: 16289 - protein, 10 aa, synthetic construct
FIWDNTSFFP

SEQ ID NO: 16290 - protein, 10 aa, synthetic construct
PEWFIGDWLE

SEQ ID NO: 16291 - protein, 10 aa, synthetic construct
FLADRTSTPM

SEQ ID NO: 16292 - protein, 12 aa, synthetic construct
FLWWPGGAGSGS

SEQ ID NO: 16293 - protein, 10 aa, synthetic construct
DRAKGYDLEL

SEQ ID NO: 16294 - protein, 9 aa, synthetic construct
FLYGLHALF

SEQ ID NO: 16295 - protein, 9 aa, synthetic construct
FYIPMILLA

SEQ ID NO: 16296 - protein, 12 aa, synthetic construct
DPPASASEVAGI

SEQ ID NO: 16297 - protein, 9 aa, synthetic construct
IFYSAEKED

SEQ ID NO: 16298 - protein, 9 aa, synthetic construct
FLMDHVFIQ

SEQ ID NO: 16299 - protein, 8 aa, synthetic construct
STCRKMEL

SEQ ID NO: 16300 - protein, 9 aa, synthetic construct
IQWRALAGW

SEQ ID NO: 16301 - protein, 9 aa, synthetic construct
GFGAHLPSR

SEQ ID NO: 16302 - protein, 9 aa, synthetic construct
VTCRDLVEY

SEQ ID NO: 16303 - protein, 11 aa, synthetic construct
VNPPQPPLPET

SEQ ID NO: 16304 - protein, 8 aa, synthetic construct
FINAPDRP

SEQ ID NO: 16305 - protein, 9 aa, synthetic construct
FPAAARSEP

SEQ ID NO: 16306 - protein, 8 aa, synthetic construct
LCLLPLPT

SEQ ID NO: 16307 - protein, 8 aa, synthetic construct
WDPEAFQL

SEQ ID NO: 16308 - protein, 8 aa, synthetic construct
TFNTQAMY

SEQ ID NO: 16309 - protein, 8 aa, synthetic construct
YCRSFYPE

SEQ ID NO: 16310 - protein, 9 aa, synthetic construct
FPMEGWVAW

SEQ ID NO: 16311 - protein, 9 aa, synthetic construct
IGTQLNTVF

SEQ ID NO: 16312 - protein, 8 aa, synthetic construct
LMAEILPE

SEQ ID NO: 16313 - protein, 8 aa, synthetic construct
APEFPILE

SEQ ID NO: 16314 - protein, 11 aa, synthetic construct
PLEAGMIVTDE

SEQ ID NO: 16315 - protein, 8 aa, synthetic construct
APKQVFPF

SEQ ID NO: 16316 - protein, 8 aa, synthetic construct
FPTQSLLF

SEQ ID NO: 16317 - protein, 9 aa, synthetic construct
MINTTLIFY

SEQ ID NO: 16318 - protein, 8 aa, synthetic construct
FLPILMHW

SEQ ID NO: 16319 - protein, 8 aa, synthetic construct
SWILPLTY

SEQ ID NO: 16320 - protein, 10 aa, synthetic construct
SLQSQGFVKF

SEQ ID NO: 16321 - protein, 9 aa, synthetic construct
FAPLSAAFD

SEQ ID NO: 16322 - protein, 11 aa, synthetic construct
IMAIVISNMAE

SEQ ID NO: 16323 - protein, 10 aa, synthetic construct
QGPGIAFVVY

SEQ ID NO: 16324 - protein, 9 aa, synthetic construct
VLKACSPKF

SEQ ID NO: 16325 - protein, 11 aa, synthetic construct
GSGKAGAMDVI

SEQ ID NO: 16326 - protein, 9 aa, synthetic construct
DVMVNMIAL

SEQ ID NO: 16327 - protein, 10 aa, synthetic construct
FPAAVSSQKK

SEQ ID NO: 16328 - protein, 9 aa, synthetic construct
FPATLCPLE

SEQ ID NO: 16329 - protein, 9 aa, synthetic construct
FPAALLRVP

SEQ ID NO: 16330 - protein, 12 aa, synthetic construct
FPASAAGSLMFQ

SEQ ID NO: 16331 - protein, 9 aa, synthetic construct
FPASQGLFP

SEQ ID NO: 16332 - protein, 8 aa, synthetic construct
DLYREVML

SEQ ID NO: 16333 - protein, 11 aa, synthetic construct
FPATLSSIGSG

SEQ ID NO: 16334 - protein, 8 aa, synthetic construct
FPAEVMHK

SEQ ID NO: 16335 - protein, 9 aa, synthetic construct
FAPEDPCFF

SEQ ID NO: 16336 - protein, 10 aa, synthetic construct
FPEDCTFLTT

SEQ ID NO: 16337 - protein, 10 aa, synthetic construct
AVQGYWEDPE

SEQ ID NO: 16338 - protein, 10 aa, synthetic construct
FKELTPNYNP

SEQ ID NO: 16339 - protein, 8 aa, synthetic construct
FVEPIPYG

SEQ ID NO: 16340 - protein, 8 aa, synthetic construct
FLHCLKQY

SEQ ID NO: 16341 - protein, 10 aa, synthetic construct
FPDPEKFKPE

SEQ ID NO: 16342 - protein, 10 aa, synthetic construct
MLDLEEQLEE

SEQ ID NO: 16343 - protein, 10 aa, synthetic construct
FPDVMEQVFH

SEQ ID NO: 16344 - protein, 13 aa, synthetic construct
PPPGASSGGPRVF

SEQ ID NO: 16345 - protein, 12 aa, synthetic construct
ELMVTGPFATAG

SEQ ID NO: 16346 - protein, 10 aa, synthetic construct
FPEVMIPVFD

SEQ ID NO: 16347 - protein, 10 aa, synthetic construct
FHEPPKLPSY

SEQ ID NO: 16348 - protein, 9 aa, synthetic construct
LSCAAWLTY

SEQ ID NO: 16349 - protein, 10 aa, synthetic construct
FPFPKPDLIF

SEQ ID NO: 16350 - protein, 11 aa, synthetic construct
CNLHLPGSSDF

SEQ ID NO: 16351 - protein, 10 aa, synthetic construct
VHHGQGTQFT

SEQ ID NO: 16352 - protein, 10 aa, synthetic construct
FLPEDISVVF

SEQ ID NO: 16353 - protein, 9 aa, synthetic construct
KENTAYFEF

SEQ ID NO: 16354 - protein, 9 aa, synthetic construct
IVNGTMEIY

SEQ ID NO: 16355 - protein, 9 aa, synthetic construct
QNRQPFPAL

SEQ ID NO: 16356 - protein, 9 aa, synthetic construct
FVDVGLYQY

SEQ ID NO: 16357 - protein, 9 aa, synthetic construct
EPFLHGNSF

SEQ ID NO: 16358 - protein, 8 aa, synthetic construct
FPEHHCHI

SEQ ID NO: 16359 - protein, 9 aa, synthetic construct
AERKLPEPE

SEQ ID NO: 16360 - protein, 11 aa, synthetic construct
EPFSISFSKRI

SEQ ID NO: 16361 - protein, 9 aa, synthetic construct
ESFPSPELF

SEQ ID NO: 16362 - protein, 9 aa, synthetic construct
KMTEELEAL

SEQ ID NO: 16363 - protein, 9 aa, synthetic construct
FYISWAEEY

SEQ ID NO: 16364 - protein, 8 aa, synthetic construct
TFFIPDTY

SEQ ID NO: 16365 - protein, 10 aa, synthetic construct
YVVTVLCSKE

SEQ ID NO: 16366 - protein, 9 aa, synthetic construct
LMSYKPALF

SEQ ID NO: 16367 - protein, 10 aa, synthetic construct
TCEKSKPVPL

SEQ ID NO: 16368 - protein, 8 aa, synthetic construct
AEIMFESF

SEQ ID NO: 16369 - protein, 9 aa, synthetic construct
FPFYEVERL

SEQ ID NO: 16370 - protein, 10 aa, synthetic construct
FPFMGSRSID

SEQ ID NO: 16371 - protein, 9 aa, synthetic construct
DVEEITPAI

SEQ ID NO: 16372 - protein, 10 aa, synthetic construct
FPFIFNGKSY

SEQ ID NO: 16373 - protein, 9 aa, synthetic construct
FPVMLTVSL

SEQ ID NO: 16374 - protein, 12 aa, synthetic construct
FLAHGPAFRKNF

SEQ ID NO: 16375 - protein, 10 aa, synthetic construct
FPSRMTIGML

SEQ ID NO: 16376 - protein, 9 aa, synthetic construct
TAAFLMLPE

SEQ ID NO: 16377 - protein, 8 aa, synthetic construct
FPQQTPHW

SEQ ID NO: 16378 - protein, 9 aa, synthetic construct
FPALDILRL

SEQ ID NO: 16379 - protein, 7 aa, synthetic construct
QYREKAY

SEQ ID NO: 16380 - protein, 9 aa, synthetic construct
QGRQGPKGE

SEQ ID NO: 16381 - protein, 8 aa, synthetic construct
PPANFSPF

SEQ ID NO: 16382 - protein, 10 aa, synthetic construct
FTASAIQASE

SEQ ID NO: 16383 - protein, 9 aa, synthetic construct
LQKMTVHPE

SEQ ID NO: 16384 - protein, 11 aa, synthetic construct
LAGTGAKHPVL

SEQ ID NO: 16385 - protein, 9 aa, synthetic construct
FPHLPYKAA

SEQ ID NO: 16386 - protein, 10 aa, synthetic construct
LMHQQIISAL

SEQ ID NO: 16387 - protein, 9 aa, synthetic construct
FHSIPLVLI

SEQ ID NO: 16388 - protein, 10 aa, synthetic construct
QTWHFEATTY

SEQ ID NO: 16389 - protein, 10 aa, synthetic construct
HPFMAASRPF

SEQ ID NO: 16390 - protein, 10 aa, synthetic construct
FPHSTLMLGI

SEQ ID NO: 16391 - protein, 10 aa, synthetic construct
SIQDVTKFTF

SEQ ID NO: 16392 - protein, 9 aa, synthetic construct
YESQRRVTF

SEQ ID NO: 16393 - protein, 9 aa, synthetic construct
HKTPDWLGY

SEQ ID NO: 16394 - protein, 11 aa, synthetic construct
FPLGAARSATG

SEQ ID NO: 16395 - protein, 9 aa, synthetic construct
QPKTQRTSI

SEQ ID NO: 16396 - protein, 13 aa, synthetic construct
RILRAAQEGDLPE

SEQ ID NO: 16397 - protein, 11 aa, synthetic construct
FPLPPPPLAGD

SEQ ID NO: 16398 - protein, 9 aa, synthetic construct
LFPADPFPG

SEQ ID NO: 16399 - protein, 12 aa, synthetic construct
PGASLRSSGELP

SEQ ID NO: 16400 - protein, 9 aa, synthetic construct
LIMPVPGIL

SEQ ID NO: 16401 - protein, 10 aa, synthetic construct
FPLPLGVALR

SEQ ID NO: 16402 - protein, 11 aa, synthetic construct
SPFAPFLGPSY

SEQ ID NO: 16403 - protein, 9 aa, synthetic construct
DAFLPAILF

SEQ ID NO: 16404 - protein, 9 aa, synthetic construct
FPIQATISF

SEQ ID NO: 16405 - protein, 11 aa, synthetic construct
VGGSPNRMKAF

SEQ ID NO: 16406 - protein, 9 aa, synthetic construct
WKTHYIVGY

SEQ ID NO: 16407 - protein, 9 aa, synthetic construct
ATDNISKLF

SEQ ID NO: 16408 - protein, 9 aa, synthetic construct
IPFIHLPEI

SEQ ID NO: 16409 - protein, 8 aa, synthetic construct
TKQKISHE

SEQ ID NO: 16410 - protein, 8 aa, synthetic construct
ATAKTQLY

SEQ ID NO: 16411 - protein, 11 aa, synthetic construct
LFPLLPQDVHL

SEQ ID NO: 16412 - protein, 9 aa, synthetic construct
VLLESPFEF

SEQ ID NO: 16413 - protein, 9 aa, synthetic construct
FPDHSLLAI

SEQ ID NO: 16414 - protein, 9 aa, synthetic construct
GLEEFLSAM

SEQ ID NO: 16415 - protein, 9 aa, synthetic construct
FPMPYTSSM

SEQ ID NO: 16416 - protein, 9 aa, synthetic construct
FGKDPNTSV

SEQ ID NO: 16417 - protein, 10 aa, synthetic construct
PEPEAFNTGF

SEQ ID NO: 16418 - protein, 9 aa, synthetic construct
INSLTYSPF

SEQ ID NO: 16419 - protein, 9 aa, synthetic construct
FAPNLITVK

SEQ ID NO: 16420 - protein, 8 aa, synthetic construct
FYYSKFFD

SEQ ID NO: 16421 - protein, 10 aa, synthetic construct
VPNEFNGAVF

SEQ ID NO: 16422 - protein, 9 aa, synthetic construct
LMLNKGPSL

SEQ ID NO: 16423 - protein, 9 aa, synthetic construct
IIMNPGISK

SEQ ID NO: 16424 - protein, 9 aa, synthetic construct
MLNLAGQLI

SEQ ID NO: 16425 - protein, 9 aa, synthetic construct
FPLGFCLVL

SEQ ID NO: 16426 - protein, 8 aa, synthetic construct
FPNLAVIR

SEQ ID NO: 16427 - protein, 9 aa, synthetic construct
FPVNRTLSL

SEQ ID NO: 16428 - protein, 9 aa, synthetic construct
ALQICNGPF

SEQ ID NO: 16429 - protein, 9 aa, synthetic construct
FPFPAIDQI

SEQ ID NO: 16430 - protein, 9 aa, synthetic construct
SALGSRYFL

SEQ ID NO: 16431 - protein, 9 aa, synthetic construct
FQIPQIGYQ

SEQ ID NO: 16432 - protein, 10 aa, synthetic construct
FPVQATINLY

SEQ ID NO: 16433 - protein, 9 aa, synthetic construct
FSTNEPIFS

SEQ ID NO: 16434 - protein, 13 aa, synthetic construct
FSVAGAGLASWNY

SEQ ID NO: 16435 - protein, 8 aa, synthetic construct
RTDPAAVY

SEQ ID NO: 16436 - protein, 10 aa, synthetic construct
FDVPTASVTE

SEQ ID NO: 16437 - protein, 9 aa, synthetic construct
MKEFGWPLE

SEQ ID NO: 16438 - protein, 10 aa, synthetic construct
IQRVLFGHGL

SEQ ID NO: 16439 - protein, 9 aa, synthetic construct
FERPPRPLK

SEQ ID NO: 16440 - protein, 10 aa, synthetic construct
GNKVPHFPEI

SEQ ID NO: 16441 - protein, 8 aa, synthetic construct
FHILLFDL

SEQ ID NO: 16442 - protein, 9 aa, synthetic construct
VQMKPVKSV

SEQ ID NO: 16443 - protein, 12 aa, synthetic construct
LPTPGGAAVRGE

SEQ ID NO: 16444 - protein, 9 aa, synthetic construct
FQGLLRLKL

SEQ ID NO: 16445 - protein, 11 aa, synthetic construct
HSLPPTHPSSI

SEQ ID NO: 16446 - protein, 9 aa, synthetic construct
FPSSQIPSW

SEQ ID NO: 16447 - protein, 10 aa, synthetic construct
SANDTSILIV

SEQ ID NO: 16448 - protein, 8 aa, synthetic construct
VIEEVNFM

SEQ ID NO: 16449 - protein, 8 aa, synthetic construct
KWLRISPE

SEQ ID NO: 16450 - protein, 9 aa, synthetic construct
FPSPGRLVR

SEQ ID NO: 16451 - protein, 10 aa, synthetic construct
FSGTKSDVYK

SEQ ID NO: 16452 - protein, 9 aa, synthetic construct
FPSLSRPSL

SEQ ID NO: 16453 - protein, 10 aa, synthetic construct
SLMANLVAAF

SEQ ID NO: 16454 - protein, 9 aa, synthetic construct
NLSVPFEMT

SEQ ID NO: 16455 - protein, 9 aa, synthetic construct
SRDSILSEM

SEQ ID NO: 16456 - protein, 10 aa, synthetic construct
QMVAIVLGAF

SEQ ID NO: 16457 - protein, 8 aa, synthetic construct
FMDVLFVY

SEQ ID NO: 16458 - protein, 9 aa, synthetic construct
STPSFSSSI

SEQ ID NO: 16459 - protein, 9 aa, synthetic construct
FTLRSINPF

SEQ ID NO: 16460 - protein, 11 aa, synthetic construct
AMEIMPETLEY

SEQ ID NO: 16461 - protein, 8 aa, synthetic construct
FPTLETVF

SEQ ID NO: 16462 - protein, 8 aa, synthetic construct
MLTPPQEL

SEQ ID NO: 16463 - protein, 8 aa, synthetic construct
FRRTQMML

SEQ ID NO: 16464 - protein, 9 aa, synthetic construct
FPTQPDRPY

SEQ ID NO: 16465 - protein, 8 aa, synthetic construct
FPRRRQLY

SEQ ID NO: 16466 - protein, 10 aa, synthetic construct
FVPESLENLY

SEQ ID NO: 16467 - protein, 11 aa, synthetic construct
FVGNRMLNPYY

SEQ ID NO: 16468 - protein, 12 aa, synthetic construct
FPVSVTQQSPAA

SEQ ID NO: 16469 - protein, 12 aa, synthetic construct
FPVTAAAPATPS

SEQ ID NO: 16470 - protein, 12 aa, synthetic construct
ETIERPVGTGAM

SEQ ID NO: 16471 - protein, 11 aa, synthetic construct
FPTSDKQQPQT

SEQ ID NO: 16472 - protein, 12 aa, synthetic construct
FPVGEDGCSPKQ

SEQ ID NO: 16473 - protein, 10 aa, synthetic construct
MLVEVGGTVL

SEQ ID NO: 16474 - protein, 10 aa, synthetic construct
TTPTGSAPSL

SEQ ID NO: 16475 - protein, 8 aa, synthetic construct
QSKNGTPF

SEQ ID NO: 16476 - protein, 10 aa, synthetic construct
YSLFKDGVEP

SEQ ID NO: 16477 - protein, 9 aa, synthetic construct
YFPVGTVVE

SEQ ID NO: 16478 - protein, 8 aa, synthetic construct
VLWTVFLG

SEQ ID NO: 16479 - protein, 10 aa, synthetic construct
PEPLSYPVLE

SEQ ID NO: 16480 - protein, 10 aa, synthetic construct
SQKPPTLIPE

SEQ ID NO: 16481 - protein, 11 aa, synthetic construct
NANLEYKTGAF

SEQ ID NO: 16482 - protein, 10 aa, synthetic construct
QSKVSAPGVL

SEQ ID NO: 16483 - protein, 10 aa, synthetic construct
FPVPMLITAS

SEQ ID NO: 16484 - protein, 11 aa, synthetic construct
MENNVLILDSF

SEQ ID NO: 16485 - protein, 9 aa, synthetic construct
LFSQDGNYF

SEQ ID NO: 16486 - protein, 9 aa, synthetic construct
PVSFPETPY

SEQ ID NO: 16487 - protein, 9 aa, synthetic construct
TVFPSLSPL

SEQ ID NO: 16488 - protein, 11 aa, synthetic construct
FRSIPFVLMPF

SEQ ID NO: 16489 - protein, 12 aa, synthetic construct
FISSKFSSKIKY

SEQ ID NO: 16490 - protein, 10 aa, synthetic construct
FPAANMNEHL

SEQ ID NO: 16491 - protein, 11 aa, synthetic construct
LTFHWGNNGPF

SEQ ID NO: 16492 - protein, 12 aa, synthetic construct
SSPLSSPLPSTL

SEQ ID NO: 16493 - protein, 10 aa, synthetic construct
EWAARISEEY

SEQ ID NO: 16494 - protein, 10 aa, synthetic construct
YNDGHLFSPE

SEQ ID NO: 16495 - protein, 10 aa, synthetic construct
FPEAARTHQI

SEQ ID NO: 16496 - protein, 11 aa, synthetic construct
FMLYTSGSTGM

SEQ ID NO: 16497 - protein, 10 aa, synthetic construct
FFILNCMVPF

SEQ ID NO: 16498 - protein, 8 aa, synthetic construct
PFNEYSKF

SEQ ID NO: 16499 - protein, 9 aa, synthetic construct
FYVGAEVTY

SEQ ID NO: 16500 - protein, 11 aa, synthetic construct
FLSTSNEAVYK

SEQ ID NO: 16501 - protein, 9 aa, synthetic construct
YIMVLVCYV

SEQ ID NO: 16502 - protein, 10 aa, synthetic construct
FRKDFPLSGY

SEQ ID NO: 16503 - protein, 9 aa, synthetic construct
YYPFSEVLA

SEQ ID NO: 16504 - protein, 10 aa, synthetic construct
HFMTGYRVIF

SEQ ID NO: 16505 - protein, 8 aa, synthetic construct
QLKSMWFT

SEQ ID NO: 16506 - protein, 9 aa, synthetic construct
PPDMVWLPE

SEQ ID NO: 16507 - protein, 10 aa, synthetic construct
LMLKMMSTLE

SEQ ID NO: 16508 - protein, 9 aa, synthetic construct
LMEKERMIF

SEQ ID NO: 16509 - protein, 10 aa, synthetic construct
FPIIMMVSNI

SEQ ID NO: 16510 - protein, 9 aa, synthetic construct
MYPSTVPSV

SEQ ID NO: 16511 - protein, 9 aa, synthetic construct
QEWINMTGF

SEQ ID NO: 16512 - protein, 10 aa, synthetic construct
TPEMPTMEPE

SEQ ID NO: 16513 - protein, 8 aa, synthetic construct
SLFQALLV

SEQ ID NO: 16514 - protein, 8 aa, synthetic construct
FQAMQKDL

SEQ ID NO: 16515 - protein, 10 aa, synthetic construct
PVVGMSPTLV

SEQ ID NO: 16516 - protein, 10 aa, synthetic construct
VLASLKFGSL

SEQ ID NO: 16517 - protein, 11 aa, synthetic construct
LIVSSGPGLWA

SEQ ID NO: 16518 - protein, 9 aa, synthetic construct
KKHDIMIQE

SEQ ID NO: 16519 - protein, 8 aa, synthetic construct
FQTTRLIL

SEQ ID NO: 16520 - protein, 10 aa, synthetic construct
IKPAFGTNQE

SEQ ID NO: 16521 - protein, 8 aa, synthetic construct
FQLRVREL

SEQ ID NO: 16522 - protein, 10 aa, synthetic construct
LEHPLFVGGM

SEQ ID NO: 16523 - protein, 10 aa, synthetic construct
AYAAELAGLS

SEQ ID NO: 16524 - protein, 8 aa, synthetic construct
FQTKHTLI

SEQ ID NO: 16525 - protein, 8 aa, synthetic construct
TKMILTEL

SEQ ID NO: 16526 - protein, 9 aa, synthetic construct
ESVDHVETV

SEQ ID NO: 16527 - protein, 8 aa, synthetic construct
FQYAFLKI

SEQ ID NO: 16528 - protein, 8 aa, synthetic construct
FQKEFKVL

SEQ ID NO: 16529 - protein, 10 aa, synthetic construct
FQYGTAQIKM

SEQ ID NO: 16530 - protein, 10 aa, synthetic construct
CILSAATNKL

SEQ ID NO: 16531 - protein, 8 aa, synthetic construct
RTRMEKEL

SEQ ID NO: 16532 - protein, 11 aa, synthetic construct
DNGSVVPNCDI

SEQ ID NO: 16533 - protein, 9 aa, synthetic construct
SPHQPEPKI

SEQ ID NO: 16534 - protein, 10 aa, synthetic construct
LEKDSLLLVV

SEQ ID NO: 16535 - protein, 11 aa, synthetic construct
GAMASIYRGGY

SEQ ID NO: 16536 - protein, 12 aa, synthetic construct
AALDPRAPAGTL

SEQ ID NO: 16537 - protein, 10 aa, synthetic construct
LLSEADPYVI

SEQ ID NO: 16538 - protein, 10 aa, synthetic construct
MIVVESLLKI

SEQ ID NO: 16539 - protein, 9 aa, synthetic construct
SMFRLLQQL

SEQ ID NO: 16540 - protein, 10 aa, synthetic construct
SKRSAVSAPK

SEQ ID NO: 16541 - protein, 8 aa, synthetic construct
RFLEIQKP

SEQ ID NO: 16542 - protein, 9 aa, synthetic construct
SKEFQALIV

SEQ ID NO: 16543 - protein, 10 aa, synthetic construct
SLTLEMFPLV

SEQ ID NO: 16544 - protein, 9 aa, synthetic construct
IFVWAFTSL

SEQ ID NO: 16545 - protein, 9 aa, synthetic construct
IERAFKDEY

SEQ ID NO: 16546 - protein, 9 aa, synthetic construct
LPNNKYIYF

SEQ ID NO: 16547 - protein, 11 aa, synthetic construct
IVWTLFGPSGL

SEQ ID NO: 16548 - protein, 11 aa, synthetic construct
VKAPHQVPVQS

SEQ ID NO: 16549 - protein, 10 aa, synthetic construct
ILHSLKFNRE

SEQ ID NO: 16550 - protein, 11 aa, synthetic construct
GGQGPPPAPQL

SEQ ID NO: 16551 - protein, 10 aa, synthetic construct
AEEKTPLLVL

SEQ ID NO: 16552 - protein, 9 aa, synthetic construct
NTFLRHLVL

SEQ ID NO: 16553 - protein, 9 aa, synthetic construct
IRNAYAVLY

SEQ ID NO: 16554 - protein, 9 aa, synthetic construct
IRDNFVIIY

SEQ ID NO: 16555 - protein, 10 aa, synthetic construct
IAISRMAVLY

SEQ ID NO: 16556 - protein, 10 aa, synthetic construct
QLGSMPQYYY

SEQ ID NO: 16557 - protein, 12 aa, synthetic construct
ADSIASDAISVY

SEQ ID NO: 16558 - protein, 11 aa, synthetic construct
GPGLPGWLHEY

SEQ ID NO: 16559 - protein, 9 aa, synthetic construct
EQTPPLRFL

SEQ ID NO: 16560 - protein, 9 aa, synthetic construct
MRFFQGKTM

SEQ ID NO: 16561 - protein, 9 aa, synthetic construct
RQKKSTVVL

SEQ ID NO: 16562 - protein, 10 aa, synthetic construct
GRSPPLQSKF

SEQ ID NO: 16563 - protein, 9 aa, synthetic construct
KSMVYVKVF

SEQ ID NO: 16564 - protein, 9 aa, synthetic construct
CLRLLTHTF

SEQ ID NO: 16565 - protein, 8 aa, synthetic construct
FNRKDQLI

SEQ ID NO: 16566 - protein, 8 aa, synthetic construct
YKWLPVYK

SEQ ID NO: 16567 - protein, 11 aa, synthetic construct
VPVQIPIMKSP

SEQ ID NO: 16568 - protein, 10 aa, synthetic construct
PRRGGDVIVI

SEQ ID NO: 16569 - protein, 11 aa, synthetic construct
GAAVANPPRLL

SEQ ID NO: 16570 - protein, 10 aa, synthetic construct
VIAMSYLISV

SEQ ID NO: 16571 - protein, 10 aa, synthetic construct
CPNVPIILSV

SEQ ID NO: 16572 - protein, 9 aa, synthetic construct
MERLPIMTL

SEQ ID NO: 16573 - protein, 9 aa, synthetic construct
ALLLRFTGK

SEQ ID NO: 16574 - protein, 9 aa, synthetic construct
LFRVVVAKS

SEQ ID NO: 16575 - protein, 11 aa, synthetic construct
KMLDYLKDKKE

SEQ ID NO: 16576 - protein, 9 aa, synthetic construct
SRGKPMLVS

SEQ ID NO: 16577 - protein, 8 aa, synthetic construct
LFKWPNVS

SEQ ID NO: 16578 - protein, 10 aa, synthetic construct
ALSLSSLNVS

SEQ ID NO: 16579 - protein, 9 aa, synthetic construct
AVLEMKNVS

SEQ ID NO: 16580 - protein, 10 aa, synthetic construct
SPMQTLKVSV

SEQ ID NO: 16581 - protein, 10 aa, synthetic construct
FRVGLQSPSV

SEQ ID NO: 16582 - protein, 10 aa, synthetic construct
GVRSSLWVSV

SEQ ID NO: 16583 - protein, 12 aa, synthetic construct
SGLASASSLSSL

SEQ ID NO: 16584 - protein, 9 aa, synthetic construct
SQEHRLLRH

SEQ ID NO: 16585 - protein, 9 aa, synthetic construct
RFYRQIKRH

SEQ ID NO: 16586 - protein, 9 aa, synthetic construct
RERSYDYQF

SEQ ID NO: 16587 - protein, 9 aa, synthetic construct
YFSDIHDFE

SEQ ID NO: 16588 - protein, 9 aa, synthetic construct
FNELNGWEY

SEQ ID NO: 16589 - protein, 9 aa, synthetic construct
VSQFETEFY

SEQ ID NO: 16590 - protein, 10 aa, synthetic construct
GGELYFSDVY

SEQ ID NO: 16591 - protein, 8 aa, synthetic construct
ERDYSPYY

SEQ ID NO: 16592 - protein, 8 aa, synthetic construct
ECLYQEQY

SEQ ID NO: 16593 - protein, 11 aa, synthetic construct
FASGEMSGAEY

SEQ ID NO: 16594 - protein, 9 aa, synthetic construct
SLMTIMEDY

SEQ ID NO: 16595 - protein, 10 aa, synthetic construct
PRNEEHPGSF

SEQ ID NO: 16596 - protein, 10 aa, synthetic construct
YNGEEFSFPH

SEQ ID NO: 16597 - protein, 8 aa, synthetic construct
VCTCKAGY

SEQ ID NO: 16598 - protein, 9 aa, synthetic construct
FSEISVGAE

SEQ ID NO: 16599 - protein, 9 aa, synthetic construct
FSEGVVDSV

SEQ ID NO: 16600 - protein, 9 aa, synthetic construct
FSFLEVIFT

SEQ ID NO: 16601 - protein, 8 aa, synthetic construct
AYFASSNI

SEQ ID NO: 16602 - protein, 9 aa, synthetic construct
FQHLPLLSL

SEQ ID NO: 16603 - protein, 9 aa, synthetic construct
GRKELFAAF

SEQ ID NO: 16604 - protein, 8 aa, synthetic construct
LPAGSFTL

SEQ ID NO: 16605 - protein, 7 aa, synthetic construct
LNTPFTL

SEQ ID NO: 16606 - protein, 9 aa, synthetic construct
VHNYSAVVL

SEQ ID NO: 16607 - protein, 10 aa, synthetic construct
SFHPVGLVNL

SEQ ID NO: 16608 - protein, 9 aa, synthetic construct
VRAQYERAY

SEQ ID NO: 16609 - protein, 8 aa, synthetic construct
FSKWGVTN

SEQ ID NO: 16610 - protein, 8 aa, synthetic construct
FSHLSKYG

SEQ ID NO: 16611 - protein, 9 aa, synthetic construct
YALDSESPV

SEQ ID NO: 16612 - protein, 12 aa, synthetic construct
NKESKGETGKRS

SEQ ID NO: 16613 - protein, 11 aa, synthetic construct
VVFTEEELELL

SEQ ID NO: 16614 - protein, 12 aa, synthetic construct
SFLVNPESDSLI

SEQ ID NO: 16615 - protein, 12 aa, synthetic construct
VRSSVEDTVKNS

SEQ ID NO: 16616 - protein, 10 aa, synthetic construct
FSMATKKASL

SEQ ID NO: 16617 - protein, 9 aa, synthetic construct
YEKMTSGMY

SEQ ID NO: 16618 - protein, 10 aa, synthetic construct
AYPAGPHTHP

SEQ ID NO: 16619 - protein, 9 aa, synthetic construct
SFPLPTALP

SEQ ID NO: 16620 - protein, 10 aa, synthetic construct
RPALAAGLSF

SEQ ID NO: 16621 - protein, 10 aa, synthetic construct
MTLGGLFGFA

SEQ ID NO: 16622 - protein, 12 aa, synthetic construct
FSRGGAKFIGMI

SEQ ID NO: 16623 - protein, 8 aa, synthetic construct
FSSNPISL

SEQ ID NO: 16624 - protein, 8 aa, synthetic construct
NQSYQFVI

SEQ ID NO: 16625 - protein, 10 aa, synthetic construct
GIYFAWLGYY

SEQ ID NO: 16626 - protein, 9 aa, synthetic construct
VVTGYLVYS

SEQ ID NO: 16627 - protein, 9 aa, synthetic construct
ESDTSKQKE

SEQ ID NO: 16628 - protein, 10 aa, synthetic construct
ASCQVLEAET

SEQ ID NO: 16629 - protein, 9 aa, synthetic construct
FTGLNYMVY

SEQ ID NO: 16630 - protein, 8 aa, synthetic construct
NIAIFTEV

SEQ ID NO: 16631 - protein, 11 aa, synthetic construct
TDFETEPETAP

SEQ ID NO: 16632 - protein, 9 aa, synthetic construct
TFDGRHYSF

SEQ ID NO: 16633 - protein, 10 aa, synthetic construct
QRNICNSEIY

SEQ ID NO: 16634 - protein, 10 aa, synthetic construct
VDYVDVGGAY

SEQ ID NO: 16635 - protein, 9 aa, synthetic construct
ANPESFGLY

SEQ ID NO: 16636 - protein, 9 aa, synthetic construct
FYTLKNGTF

SEQ ID NO: 16637 - protein, 11 aa, synthetic construct
LLDNSHLPATF

SEQ ID NO: 16638 - protein, 11 aa, synthetic construct
YEAVLTGHQPL

SEQ ID NO: 16639 - protein, 9 aa, synthetic construct
FTPVSSKEL

SEQ ID NO: 16640 - protein, 9 aa, synthetic construct
FSPMMQAEF

SEQ ID NO: 16641 - protein, 10 aa, synthetic construct
EELEASHITE

SEQ ID NO: 16642 - protein, 10 aa, synthetic construct
GISDADFVLY

SEQ ID NO: 16643 - protein, 12 aa, synthetic construct
KAYMGSCGRQEY

SEQ ID NO: 16644 - protein, 12 aa, synthetic construct
KTDSDMFVNTEY

SEQ ID NO: 16645 - protein, 10 aa, synthetic construct
EWTAGFEGYS

SEQ ID NO: 16646 - protein, 9 aa, synthetic construct
TFDHGMGYF

SEQ ID NO: 16647 - protein, 10 aa, synthetic construct
FTTVQRVASE

SEQ ID NO: 16648 - protein, 9 aa, synthetic construct
NLTEERKTF

SEQ ID NO: 16649 - protein, 9 aa, synthetic construct
METVKLLDY

SEQ ID NO: 16650 - protein, 10 aa, synthetic construct
FTTNFGKRGI

SEQ ID NO: 16651 - protein, 8 aa, synthetic construct
FKTKVPII

SEQ ID NO: 16652 - protein, 9 aa, synthetic construct
FTLLGKPLL

SEQ ID NO: 16653 - protein, 10 aa, synthetic construct
SVTMGETVSF

SEQ ID NO: 16654 - protein, 9 aa, synthetic construct
LPSDTFALA

SEQ ID NO: 16655 - protein, 9 aa, synthetic construct
TLMRGRSLL

SEQ ID NO: 16656 - protein, 9 aa, synthetic construct
ISLDGFFML

SEQ ID NO: 16657 - protein, 8 aa, synthetic construct
FTVRTWPR

SEQ ID NO: 16658 - protein, 10 aa, synthetic construct
FTVDKNGVLK

SEQ ID NO: 16659 - protein, 9 aa, synthetic construct
FTVMRQSSL

SEQ ID NO: 16660 - protein, 9 aa, synthetic construct
FTNRAFLSE

SEQ ID NO: 16661 - protein, 11 aa, synthetic construct
FLSVIFLKEPG

SEQ ID NO: 16662 - protein, 10 aa, synthetic construct
FLSVIKHYRS

SEQ ID NO: 16663 - protein, 9 aa, synthetic construct
FVCRPASLY

SEQ ID NO: 16664 - protein, 8 aa, synthetic construct
NIVFVTYF

SEQ ID NO: 16665 - protein, 10 aa, synthetic construct
FVAQPPTCEV

SEQ ID NO: 16666 - protein, 9 aa, synthetic construct
FVAPEVINY

SEQ ID NO: 16667 - protein, 10 aa, synthetic construct
QLDAPVFVAY

SEQ ID NO: 16668 - protein, 10 aa, synthetic construct
DIVTKGQVCE

SEQ ID NO: 16669 - protein, 9 aa, synthetic construct
FVDVVDTYR

SEQ ID NO: 16670 - protein, 9 aa, synthetic construct
LFVDEFLTY

SEQ ID NO: 16671 - protein, 11 aa, synthetic construct
FVNGVAIHSMD

SEQ ID NO: 16672 - protein, 9 aa, synthetic construct
DVFPVLSQY

SEQ ID NO: 16673 - protein, 10 aa, synthetic construct
FVDGKSPLQV

SEQ ID NO: 16674 - protein, 9 aa, synthetic construct
IIEPGFVFI

SEQ ID NO: 16675 - protein, 8 aa, synthetic construct
VFHKMIFL

SEQ ID NO: 16676 - protein, 9 aa, synthetic construct
FVECRFYSL

SEQ ID NO: 16677 - protein, 10 aa, synthetic construct
HNSPLVTGVE

SEQ ID NO: 16678 - protein, 9 aa, synthetic construct
FVVFFAIYL

SEQ ID NO: 16679 - protein, 9 aa, synthetic construct
LAEPWKVYL

SEQ ID NO: 16680 - protein, 9 aa, synthetic construct
ELMPRLLPV

SEQ ID NO: 16681 - protein, 9 aa, synthetic construct
FAKVFLPVF

SEQ ID NO: 16682 - protein, 9 aa, synthetic construct
VFHAGTALK

SEQ ID NO: 16683 - protein, 10 aa, synthetic construct
NGFTTQTVGA

SEQ ID NO: 16684 - protein, 10 aa, synthetic construct
VFISRGDLLG

SEQ ID NO: 16685 - protein, 9 aa, synthetic construct
VFLSWAQLL

SEQ ID NO: 16686 - protein, 8 aa, synthetic construct
FVIQFTSL

SEQ ID NO: 16687 - protein, 11 aa, synthetic construct
VFLGFSSSGEL

SEQ ID NO: 16688 - protein, 8 aa, synthetic construct
FVKKIHIE

SEQ ID NO: 16689 - protein, 9 aa, synthetic construct
FVKVDLRTV

SEQ ID NO: 16690 - protein, 11 aa, synthetic construct
FVGGIPPDVRL

SEQ ID NO: 16691 - protein, 9 aa, synthetic construct
YFVKVVPTV

SEQ ID NO: 16692 - protein, 10 aa, synthetic construct
FVLGNGLLSY

SEQ ID NO: 16693 - protein, 9 aa, synthetic construct
LPEVFLSPV

SEQ ID NO: 16694 - protein, 9 aa, synthetic construct
FVMRDNLEV

SEQ ID NO: 16695 - protein, 10 aa, synthetic construct
MPDVKAEDEV

SEQ ID NO: 16696 - protein, 9 aa, synthetic construct
FVNEIVAMT

SEQ ID NO: 16697 - protein, 9 aa, synthetic construct
FVNGKEMKS

SEQ ID NO: 16698 - protein, 11 aa, synthetic construct
FVGLVSFRGDC

SEQ ID NO: 16699 - protein, 9 aa, synthetic construct
NFGVPVEVF

SEQ ID NO: 16700 - protein, 11 aa, synthetic construct
FVGGPGRAGTD

SEQ ID NO: 16701 - protein, 9 aa, synthetic construct
SVQLMSFVY

SEQ ID NO: 16702 - protein, 9 aa, synthetic construct
FVEGVAAVL

SEQ ID NO: 16703 - protein, 9 aa, synthetic construct
NKTQPILDI

SEQ ID NO: 16704 - protein, 8 aa, synthetic construct
FVVPNEAI

SEQ ID NO: 16705 - protein, 10 aa, synthetic construct
MRVEKASPEF

SEQ ID NO: 16706 - protein, 9 aa, synthetic construct
DETVDIFSF

SEQ ID NO: 16707 - protein, 10 aa, synthetic construct
QVEYGVTGSF

SEQ ID NO: 16708 - protein, 11 aa, synthetic construct
FVSGRGLGLGP

SEQ ID NO: 16709 - protein, 9 aa, synthetic construct
FVIDGSKSL

SEQ ID NO: 16710 - protein, 9 aa, synthetic construct
FVLTKKDVD

SEQ ID NO: 16711 - protein, 11 aa, synthetic construct
LDDALDSSNSM

SEQ ID NO: 16712 - protein, 9 aa, synthetic construct
FVDKGMRHM

SEQ ID NO: 16713 - protein, 10 aa, synthetic construct
SYFVTQAGVQ

SEQ ID NO: 16714 - protein, 10 aa, synthetic construct
FVLDEADEML

SEQ ID NO: 16715 - protein, 8 aa, synthetic construct
VIEKHVFV

SEQ ID NO: 16716 - protein, 10 aa, synthetic construct
LDNPTPEMEA

SEQ ID NO: 16717 - protein, 10 aa, synthetic construct
VAHACNPSIL

SEQ ID NO: 16718 - protein, 11 aa, synthetic construct
YDFLIYDGVID

SEQ ID NO: 16719 - protein, 10 aa, synthetic construct
FVHARSYEDL

SEQ ID NO: 16720 - protein, 8 aa, synthetic construct
FVYNYLKY

SEQ ID NO: 16721 - protein, 10 aa, synthetic construct
FVDSVAVLEM

SEQ ID NO: 16722 - protein, 10 aa, synthetic construct
FVYVNPEDGR

SEQ ID NO: 16723 - protein, 10 aa, synthetic construct
PSYESMTLML

SEQ ID NO: 16724 - protein, 10 aa, synthetic construct
FVMGLTSPDR

SEQ ID NO: 16725 - protein, 10 aa, synthetic construct
YFAVDTASAI

SEQ ID NO: 16726 - protein, 10 aa, synthetic construct
FYICENFTLS

SEQ ID NO: 16727 - protein, 9 aa, synthetic construct
MTEYKLVVV

SEQ ID NO: 16728 - protein, 8 aa, synthetic construct
LFYDVEAL

SEQ ID NO: 16729 - protein, 9 aa, synthetic construct
YFDIYFEKN

SEQ ID NO: 16730 - protein, 9 aa, synthetic construct
LDPDSFYEL

SEQ ID NO: 16731 - protein, 10 aa, synthetic construct
QTPSPMPTLI

SEQ ID NO: 16732 - protein, 9 aa, synthetic construct
KGVCYCIYM

SEQ ID NO: 16733 - protein, 8 aa, synthetic construct
LDFYGVEL

SEQ ID NO: 16734 - protein, 11 aa, synthetic construct
YFGGLSCHQLL

SEQ ID NO: 16735 - protein, 10 aa, synthetic construct
FYLQFAASFT

SEQ ID NO: 16736 - protein, 9 aa, synthetic construct
SSYSTERQM

SEQ ID NO: 16737 - protein, 9 aa, synthetic construct
FYGIPGALL

SEQ ID NO: 16738 - protein, 9 aa, synthetic construct
QQAQQYQAT

SEQ ID NO: 16739 - protein, 9 aa, synthetic construct
QAQQYQATQ

SEQ ID NO: 16740 - protein, 8 aa, synthetic construct
YFQEAMLF

SEQ ID NO: 16741 - protein, 10 aa, synthetic construct
FYQLPPSVQR

SEQ ID NO: 16742 - protein, 10 aa, synthetic construct
ASNHGLADLA

SEQ ID NO: 16743 - protein, 8 aa, synthetic construct
TQFPMDLY

SEQ ID NO: 16744 - protein, 13 aa, synthetic construct
KPAPGPHSSPPEE

SEQ ID NO: 16745 - protein, 9 aa, synthetic construct
MYKPGKVVL

SEQ ID NO: 16746 - protein, 8 aa, synthetic construct
KKIFMIVI

SEQ ID NO: 16747 - protein, 11 aa, synthetic construct
MFPGSSRIVVM

SEQ ID NO: 16748 - protein, 9 aa, synthetic construct
YMFLSQEAL

SEQ ID NO: 16749 - protein, 9 aa, synthetic construct
EMYAIGFCN

SEQ ID NO: 16750 - protein, 10 aa, synthetic construct
FMLHGAVSLP

SEQ ID NO: 16751 - protein, 9 aa, synthetic construct
GAAGSPRRY

SEQ ID NO: 16752 - protein, 10 aa, synthetic construct
QINHPFVHSL

SEQ ID NO: 16753 - protein, 9 aa, synthetic construct
QINHYQYLL

SEQ ID NO: 16754 - protein, 11 aa, synthetic construct
AGAAGGAQRGL

SEQ ID NO: 16755 - protein, 8 aa, synthetic construct
QLDNWLNK

SEQ ID NO: 16756 - protein, 8 aa, synthetic construct
QEVREKNQ

SEQ ID NO: 16757 - protein, 8 aa, synthetic construct
QENYIHVK

SEQ ID NO: 16758 - protein, 8 aa, synthetic construct
QEVYTHIK

SEQ ID NO: 16759 - protein, 8 aa, synthetic construct
AARMMMYY

SEQ ID NO: 16760 - protein, 10 aa, synthetic construct
QGGALVELTP

SEQ ID NO: 16761 - protein, 8 aa, synthetic construct
QNGKYNLE

SEQ ID NO: 16762 - protein, 12 aa, synthetic construct
GAGDGPLPPGGA

SEQ ID NO: 16763 - protein, 8 aa, synthetic construct
VPQGLEAF

SEQ ID NO: 16764 - protein, 9 aa, synthetic construct
VAGVLAHVY

SEQ ID NO: 16765 - protein, 7 aa, synthetic construct
LFLRSKQ

SEQ ID NO: 16766 - protein, 10 aa, synthetic construct
GTLAASEGRW

SEQ ID NO: 16767 - protein, 10 aa, synthetic construct
LAAAAAGLVY

SEQ ID NO: 16768 - protein, 10 aa, synthetic construct
QGGLKHILTH

SEQ ID NO: 16769 - protein, 10 aa, synthetic construct
QQLPGPTHLL

SEQ ID NO: 16770 - protein, 10 aa, synthetic construct
VGAHEISNIL

SEQ ID NO: 16771 - protein, 11 aa, synthetic construct
VGAHEISNILD

SEQ ID NO: 16772 - protein, 8 aa, synthetic construct
SLKNISIY

SEQ ID NO: 16773 - protein, 8 aa, synthetic construct
GVQGFQEF

SEQ ID NO: 16774 - protein, 9 aa, synthetic construct
VPGAAAAAL

SEQ ID NO: 16775 - protein, 9 aa, synthetic construct
AGVPLFLLE

SEQ ID NO: 16776 - protein, 10 aa, synthetic construct
PSDEEMLFIY

SEQ ID NO: 16777 - protein, 9 aa, synthetic construct
GAYGTPQKY

SEQ ID NO: 16778 - protein, 9 aa, synthetic construct
VMSGGILIY

SEQ ID NO: 16779 - protein, 8 aa, synthetic construct
IAICTMVY

SEQ ID NO: 16780 - protein, 11 aa, synthetic construct
GDAKTDGAQKA

SEQ ID NO: 16781 - protein, 9 aa, synthetic construct
NGIGLIREK

SEQ ID NO: 16782 - protein, 9 aa, synthetic construct
QNTVSIDPK

SEQ ID NO: 16783 - protein, 10 aa, synthetic construct
VVANGDTANK

SEQ ID NO: 16784 - protein, 11 aa, synthetic construct
SPSFGGMVPSK

SEQ ID NO: 16785 - protein, 11 aa, synthetic construct
QDEVPGSQGSQ

SEQ ID NO: 16786 - protein, 10 aa, synthetic construct
FEAEAGALGA

SEQ ID NO: 16787 - protein, 9 aa, synthetic construct
AGEAIPALA

SEQ ID NO: 16788 - protein, 10 aa, synthetic construct
LQESKVLERA

SEQ ID NO: 16789 - protein, 11 aa, synthetic construct
EQLTSLLVNGV

SEQ ID NO: 16790 - protein, 9 aa, synthetic construct
FSNELHYVA

SEQ ID NO: 16791 - protein, 9 aa, synthetic construct
ADWAVMDVV

SEQ ID NO: 16792 - protein, 14 aa, synthetic construct
SQSDSPPASPSPTA

SEQ ID NO: 16793 - protein, 9 aa, synthetic construct
ECSGFPQLG

SEQ ID NO: 16794 - protein, 7 aa, synthetic construct
WDEKFKQ

SEQ ID NO: 16795 - protein, 8 aa, synthetic construct
DAEDKCVI

SEQ ID NO: 16796 - protein, 10 aa, synthetic construct
DSQPALTPSP

SEQ ID NO: 16797 - protein, 10 aa, synthetic construct
ADDGVAEVLA

SEQ ID NO: 16798 - protein, 9 aa, synthetic construct
IGYENGTVV

SEQ ID NO: 16799 - protein, 10 aa, synthetic construct
EGEAIIVYRL

SEQ ID NO: 16800 - protein, 10 aa, synthetic construct
ISYESTPEVS

SEQ ID NO: 16801 - protein, 10 aa, synthetic construct
EEPLNVGSVA

SEQ ID NO: 16802 - protein, 10 aa, synthetic construct
QFPSPSALSL

SEQ ID NO: 16803 - protein, 9 aa, synthetic construct
SEEQLDVTI

SEQ ID NO: 16804 - protein, 11 aa, synthetic construct
ADAVPLPPPMA

SEQ ID NO: 16805 - protein, 9 aa, synthetic construct
EGQGIIYII

SEQ ID NO: 16806 - protein, 9 aa, synthetic construct
EGGTEAFTF

SEQ ID NO: 16807 - protein, 9 aa, synthetic construct
DDFAAFVGL

SEQ ID NO: 16808 - protein, 9 aa, synthetic construct
WELNPEIVA

SEQ ID NO: 16809 - protein, 11 aa, synthetic construct
ASASTASALGL

SEQ ID NO: 16810 - protein, 9 aa, synthetic construct
DNFGVYSQP

SEQ ID NO: 16811 - protein, 7 aa, synthetic construct
ADFNGFS

SEQ ID NO: 16812 - protein, 8 aa, synthetic construct
VSMNFTAA

SEQ ID NO: 16813 - protein, 8 aa, synthetic construct
MCRFGVSS

SEQ ID NO: 16814 - protein, 10 aa, synthetic construct
GDASSHPSSR

SEQ ID NO: 16815 - protein, 9 aa, synthetic construct
VSMNFTAAT

SEQ ID NO: 16816 - protein, 11 aa, synthetic construct
GTMAAFGSSLG

SEQ ID NO: 16817 - protein, 8 aa, synthetic construct
GEFNFSEV

SEQ ID NO: 16818 - protein, 11 aa, synthetic construct
EFPSQSFPGSS

SEQ ID NO: 16819 - protein, 11 aa, synthetic construct
GHETKAMLNNS

SEQ ID NO: 16820 - protein, 8 aa, synthetic construct
EGRDLSDW

SEQ ID NO: 16821 - protein, 9 aa, synthetic construct
SFFEGQSAS

SEQ ID NO: 16822 - protein, 10 aa, synthetic construct
MKDVPSYKEA

SEQ ID NO: 16823 - protein, 11 aa, synthetic construct
SLLGAFGARDA

SEQ ID NO: 16824 - protein, 13 aa, synthetic construct
TAGEMAGAFVAVF

SEQ ID NO: 16825 - protein, 8 aa, synthetic construct
NDATEVVL

SEQ ID NO: 16826 - protein, 9 aa, synthetic construct
DFTCHADLL

SEQ ID NO: 16827 - protein, 11 aa, synthetic construct
GEHTVNASWIA

SEQ ID NO: 16828 - protein, 9 aa, synthetic construct
YKNGQSLGD

SEQ ID NO: 16829 - protein, 10 aa, synthetic construct
HATDYLFVGN

SEQ ID NO: 16830 - protein, 9 aa, synthetic construct
ADIASKEFG

SEQ ID NO: 16831 - protein, 9 aa, synthetic construct
DALSKELQP

SEQ ID NO: 16832 - protein, 9 aa, synthetic construct
DAIREVETL

SEQ ID NO: 16833 - protein, 10 aa, synthetic construct
QGFQLDPPTD

SEQ ID NO: 16834 - protein, 10 aa, synthetic construct
ADIEAMVKVS

SEQ ID NO: 16835 - protein, 10 aa, synthetic construct
GGELELGELP

SEQ ID NO: 16836 - protein, 9 aa, synthetic construct
ADLESLRQA

SEQ ID NO: 16837 - protein, 10 aa, synthetic construct
ADLEKLGAWA

SEQ ID NO: 16838 - protein, 10 aa, synthetic construct
GELEKGQSQF

SEQ ID NO: 16839 - protein, 8 aa, synthetic construct
ERIMCCVA

SEQ ID NO: 16840 - protein, 9 aa, synthetic construct
DAISAPQCV

SEQ ID NO: 16841 - protein, 9 aa, synthetic construct
EGLRLPPMP

SEQ ID NO: 16842 - protein, 9 aa, synthetic construct
IEGKFGTGI

SEQ ID NO: 16843 - protein, 9 aa, synthetic construct
LEGLSLWQW

SEQ ID NO: 16844 - protein, 9 aa, synthetic construct
LLAQAEGEP

SEQ ID NO: 16845 - protein, 9 aa, synthetic construct
TPTPLKPSW

SEQ ID NO: 16846 - protein, 8 aa, synthetic construct
ADLCPLQP

SEQ ID NO: 16847 - protein, 9 aa, synthetic construct
AIDQPAMSP

SEQ ID NO: 16848 - protein, 9 aa, synthetic construct
AGEIPKVLV

SEQ ID NO: 16849 - protein, 9 aa, synthetic construct
TITRLADVV

SEQ ID NO: 16850 - protein, 8 aa, synthetic construct
EFIEGTLA

SEQ ID NO: 16851 - protein, 9 aa, synthetic construct
DALSTIRLP

SEQ ID NO: 16852 - protein, 9 aa, synthetic construct
GEKEAAGTT

SEQ ID NO: 16853 - protein, 9 aa, synthetic construct
AEREQFLLG

SEQ ID NO: 16854 - protein, 9 aa, synthetic construct
EGKAVMLAP

SEQ ID NO: 16855 - protein, 11 aa, synthetic construct
GELGAPGNLQP

SEQ ID NO: 16856 - protein, 11 aa, synthetic construct
ADKKLCNLQAG

SEQ ID NO: 16857 - protein, 9 aa, synthetic construct
ADLESALRA

SEQ ID NO: 16858 - protein, 10 aa, synthetic construct
VEALREISSA

SEQ ID NO: 16859 - protein, 9 aa, synthetic construct
LDNAIMIVA

SEQ ID NO: 16860 - protein, 9 aa, synthetic construct
IPTTPTSPA

SEQ ID NO: 16861 - protein, 9 aa, synthetic construct
ADLLDPRQP

SEQ ID NO: 16862 - protein, 9 aa, synthetic construct
ILSPGYPFP

SEQ ID NO: 16863 - protein, 8 aa, synthetic construct
ADHAPELK

SEQ ID NO: 16864 - protein, 9 aa, synthetic construct
PTPTALTAF

SEQ ID NO: 16865 - protein, 9 aa, synthetic construct
ALDLTVPAA

SEQ ID NO: 16866 - protein, 9 aa, synthetic construct
SFVLDFSQP

SEQ ID NO: 16867 - protein, 9 aa, synthetic construct
LFPFSEGLP

SEQ ID NO: 16868 - protein, 9 aa, synthetic construct
NDPGEQALP

SEQ ID NO: 16869 - protein, 10 aa, synthetic construct
GEVAGNYLIA

SEQ ID NO: 16870 - protein, 10 aa, synthetic construct
LSEGLQEGVA

SEQ ID NO: 16871 - protein, 9 aa, synthetic construct
FAYSPQVVT

SEQ ID NO: 16872 - protein, 9 aa, synthetic construct
PLTTSWTPD

SEQ ID NO: 16873 - protein, 9 aa, synthetic construct
IQQSQWNLQ

SEQ ID NO: 16874 - protein, 9 aa, synthetic construct
VNLGTDHLL

SEQ ID NO: 16875 - protein, 9 aa, synthetic construct
IDSKVADAA

SEQ ID NO: 16876 - protein, 8 aa, synthetic construct
FAATDAIP

SEQ ID NO: 16877 - protein, 11 aa, synthetic construct
DATQAGLRGPA

SEQ ID NO: 16878 - protein, 8 aa, synthetic construct
IYAIADTA

SEQ ID NO: 16879 - protein, 11 aa, synthetic construct
DAAFEALGTAL

SEQ ID NO: 16880 - protein, 10 aa, synthetic construct
QAYSKTETAI

SEQ ID NO: 16881 - protein, 9 aa, synthetic construct
EGNTALITA

SEQ ID NO: 16882 - protein, 9 aa, synthetic construct
EGHHHDVVA

SEQ ID NO: 16883 - protein, 9 aa, synthetic construct
EGVDAIPVK

SEQ ID NO: 16884 - protein, 9 aa, synthetic construct
ADVRNQIIF

SEQ ID NO: 16885 - protein, 9 aa, synthetic construct
FGDILEGEV

SEQ ID NO: 16886 - protein, 9 aa, synthetic construct
ADVAGLRKL

SEQ ID NO: 16887 - protein, 8 aa, synthetic construct
PTSPLTPT

SEQ ID NO: 16888 - protein, 9 aa, synthetic construct
EGVLGPPPP

SEQ ID NO: 16889 - protein, 9 aa, synthetic construct
SFISTMNVT

SEQ ID NO: 16890 - protein, 12 aa, synthetic construct
GEVTFPSEEGAG

SEQ ID NO: 16891 - protein, 9 aa, synthetic construct
SHSHLGMLV

SEQ ID NO: 16892 - protein, 8 aa, synthetic construct
HAWKCTVC

SEQ ID NO: 16893 - protein, 9 aa, synthetic construct
EISMSVGLG

SEQ ID NO: 16894 - protein, 10 aa, synthetic construct
GLTSAEMWAA

SEQ ID NO: 16895 - protein, 10 aa, synthetic construct
ISQEDFESIA

SEQ ID NO: 16896 - protein, 10 aa, synthetic construct
EGYEHRGTPV

SEQ ID NO: 16897 - protein, 9 aa, synthetic construct
WYNVHSAPG

SEQ ID NO: 16898 - protein, 10 aa, synthetic construct
ADNNTKANVT

SEQ ID NO: 16899 - protein, 12 aa, synthetic construct
DNAAVGKNGTTI

SEQ ID NO: 16900 - protein, 8 aa, synthetic construct
FDSLLQRQ

SEQ ID NO: 16901 - protein, 10 aa, synthetic construct
DKGGSPYIAA

SEQ ID NO: 16902 - protein, 8 aa, synthetic construct
EVMWIPSM

SEQ ID NO: 16903 - protein, 11 aa, synthetic construct
AFTGEPTPEVT

SEQ ID NO: 16904 - protein, 8 aa, synthetic construct
SDFTAPLV

SEQ ID NO: 16905 - protein, 9 aa, synthetic construct
VYGEPITAS

SEQ ID NO: 16906 - protein, 11 aa, synthetic construct
EGYVSSAPLTK

SEQ ID NO: 16907 - protein, 10 aa, synthetic construct
PMGDVPEPIP

SEQ ID NO: 16908 - protein, 10 aa, synthetic construct
SSPYSWASAA

SEQ ID NO: 16909 - protein, 9 aa, synthetic construct
TGTMPLPVP

SEQ ID NO: 16910 - protein, 9 aa, synthetic construct
FGNLVTMEW

SEQ ID NO: 16911 - protein, 9 aa, synthetic construct
FQVMFCYFE

SEQ ID NO: 16912 - protein, 11 aa, synthetic construct
NSCLGCGVEFK

SEQ ID NO: 16913 - protein, 11 aa, synthetic construct
FAGFTDYFTAM

SEQ ID NO: 16914 - protein, 9 aa, synthetic construct
TPTTFNELV

SEQ ID NO: 16915 - protein, 10 aa, synthetic construct
YYYGDSVEFN

SEQ ID NO: 16916 - protein, 10 aa, synthetic construct
CNECGKVFDQ

SEQ ID NO: 16917 - protein, 13 aa, synthetic construct
TMAVAGACCAGTA

SEQ ID NO: 16918 - protein, 10 aa, synthetic construct
FGGGAGSGYG

SEQ ID NO: 16919 - protein, 10 aa, synthetic construct
GAGSGFGGGY

SEQ ID NO: 16920 - protein, 7 aa, synthetic construct
GNNSFQY

SEQ ID NO: 16921 - protein, 9 aa, synthetic construct
FGGGFGGGD

SEQ ID NO: 16922 - protein, 9 aa, synthetic construct
GFGGGGFGG

SEQ ID NO: 16923 - protein, 8 aa, synthetic construct
KQLQGASW

SEQ ID NO: 16924 - protein, 7 aa, synthetic construct
LIVYSHW

SEQ ID NO: 16925 - protein, 10 aa, synthetic construct
GLFDEYLEMI

SEQ ID NO: 16926 - protein, 10 aa, synthetic construct
DFPSVHNDLW

SEQ ID NO: 16927 - protein, 11 aa, synthetic construct
QNPVSEASDIW

SEQ ID NO: 16928 - protein, 8 aa, synthetic construct
KAKLNSPW

SEQ ID NO: 16929 - protein, 9 aa, synthetic construct
VIGMSYVMI

SEQ ID NO: 16930 - protein, 9 aa, synthetic construct
QQQKVVNKL

SEQ ID NO: 16931 - protein, 12 aa, synthetic construct
ETNAAPPPTLTW

SEQ ID NO: 16932 - protein, 11 aa, synthetic construct
QAGQPGAVGLL

SEQ ID NO: 16933 - protein, 8 aa, synthetic construct
NAQRSVHI

SEQ ID NO: 16934 - protein, 10 aa, synthetic construct
GFGGGFGGGD

SEQ ID NO: 16935 - protein, 9 aa, synthetic construct
GGGFGGGFG

SEQ ID NO: 16936 - protein, 10 aa, synthetic construct
FGGGGFGGGG

SEQ ID NO: 16937 - protein, 11 aa, synthetic construct
GGFGGGGGFGG

SEQ ID NO: 16938 - protein, 9 aa, synthetic construct
NFGSNHPNV

SEQ ID NO: 16939 - protein, 12 aa, synthetic construct
GGFGGGSLYGGG

SEQ ID NO: 16940 - protein, 10 aa, synthetic construct
GFGGGGFGSR

SEQ ID NO: 16941 - protein, 8 aa, synthetic construct
GGFSSGGF

SEQ ID NO: 16942 - protein, 8 aa, synthetic construct
GSFGGGSF

SEQ ID NO: 16943 - protein, 7 aa, synthetic construct
GGNSFSF

SEQ ID NO: 16944 - protein, 11 aa, synthetic construct
GFGGGFGGGDG

SEQ ID NO: 16945 - protein, 11 aa, synthetic construct
GGFGGGFGGGD

SEQ ID NO: 16946 - protein, 10 aa, synthetic construct
GGGFGGGFGG

SEQ ID NO: 16947 - protein, 11 aa, synthetic construct
FGGGGGGGFGG

SEQ ID NO: 16948 - protein, 8 aa, synthetic construct
FGNSSGFG

SEQ ID NO: 16949 - protein, 9 aa, synthetic construct
GFGGGSSGF

SEQ ID NO: 16950 - protein, 11 aa, synthetic construct
GFGGGSSGFSG

SEQ ID NO: 16951 - protein, 10 aa, synthetic construct
GGGIGGGFGG

SEQ ID NO: 16952 - protein, 8 aa, synthetic construct
NGSFGSNF

SEQ ID NO: 16953 - protein, 10 aa, synthetic construct
GGSGFSGGGF

SEQ ID NO: 16954 - protein, 7 aa, synthetic construct
EWNFSAS

SEQ ID NO: 16955 - protein, 9 aa, synthetic construct
NGVLSFIKH

SEQ ID NO: 16956 - protein, 11 aa, synthetic construct
AGAALRTARAG

SEQ ID NO: 16957 - protein, 8 aa, synthetic construct
NHGEIKWI

SEQ ID NO: 16958 - protein, 7 aa, synthetic construct
NLKSKKK

SEQ ID NO: 16959 - protein, 8 aa, synthetic construct
LKNSKKKK

SEQ ID NO: 16960 - protein, 9 aa, synthetic construct
SKKLNKKKG

SEQ ID NO: 16961 - protein, 10 aa, synthetic construct
FGGSSTRGGS

SEQ ID NO: 16962 - protein, 7 aa, synthetic construct
NLIKKND

SEQ ID NO: 16963 - protein, 8 aa, synthetic construct
AEILRSLN

SEQ ID NO: 16964 - protein, 9 aa, synthetic construct
GGLRTDLLA

SEQ ID NO: 16965 - protein, 9 aa, synthetic construct
INKNLVGSA

SEQ ID NO: 16966 - protein, 9 aa, synthetic construct
VQSIHKGVE

SEQ ID NO: 16967 - protein, 11 aa, synthetic construct
GSGFGGAGGFG

SEQ ID NO: 16968 - protein, 8 aa, synthetic construct
FGSGGNFS

SEQ ID NO: 16969 - protein, 8 aa, synthetic construct
GGGNSFSF

SEQ ID NO: 16970 - protein, 9 aa, synthetic construct
GGFGGGSSF

SEQ ID NO: 16971 - protein, 9 aa, synthetic construct
GSGFSGGGF

SEQ ID NO: 16972 - protein, 10 aa, synthetic construct
GSGFSGGGFG

SEQ ID NO: 16973 - protein, 10 aa, synthetic construct
GGSFGGGFGS

SEQ ID NO: 16974 - protein, 11 aa, synthetic construct
GSGFSGGGFGG

SEQ ID NO: 16975 - protein, 9 aa, synthetic construct
ELFDIFTYS

SEQ ID NO: 16976 - protein, 10 aa, synthetic construct
LAAAGVSRGR

SEQ ID NO: 16977 - protein, 9 aa, synthetic construct
GHGKLGQDK

SEQ ID NO: 16978 - protein, 8 aa, synthetic construct
GHKEGPRS

SEQ ID NO: 16979 - protein, 13 aa, synthetic construct
VGAEGGGEAERAG

SEQ ID NO: 16980 - protein, 10 aa, synthetic construct
STSRGCHQVQ

SEQ ID NO: 16981 - protein, 11 aa, synthetic construct
EHDGSLFQAVG

SEQ ID NO: 16982 - protein, 12 aa, synthetic construct
AGSAAGDWEIDV

SEQ ID NO: 16983 - protein, 9 aa, synthetic construct
IGSDSSLDP

SEQ ID NO: 16984 - protein, 9 aa, synthetic construct
GLEIPGALS

SEQ ID NO: 16985 - protein, 9 aa, synthetic construct
GLEGLLRPH

SEQ ID NO: 16986 - protein, 10 aa, synthetic construct
AVFKTLPGPK

SEQ ID NO: 16987 - protein, 8 aa, synthetic construct
NICGKSFG

SEQ ID NO: 16988 - protein, 11 aa, synthetic construct
GGLGGGFGGGF

SEQ ID NO: 16989 - protein, 8 aa, synthetic construct
AVDIKKPL

SEQ ID NO: 16990 - protein, 10 aa, synthetic construct
SMITAITIMA

SEQ ID NO: 16991 - protein, 8 aa, synthetic construct
GLLVKKML

SEQ ID NO: 16992 - protein, 8 aa, synthetic construct
LGLYHARP

SEQ ID NO: 16993 - protein, 9 aa, synthetic construct
MIGPLVLGL

SEQ ID NO: 16994 - protein, 9 aa, synthetic construct
GQVAKQQVA

SEQ ID NO: 16995 - protein, 8 aa, synthetic construct
LGPHLHLS

SEQ ID NO: 16996 - protein, 8 aa, synthetic construct
LGPSLLHH

SEQ ID NO: 16997 - protein, 9 aa, synthetic construct
GLSFLVHTD

SEQ ID NO: 16998 - protein, 10 aa, synthetic construct
AVSVMEDKLH

SEQ ID NO: 16999 - protein, 8 aa, synthetic construct
LGAHLTLK

SEQ ID NO: 17000 - protein, 8 aa, synthetic construct
VATLHKAL

SEQ ID NO: 17001 - protein, 8 aa, synthetic construct
AVTLAKIH

SEQ ID NO: 17002 - protein, 11 aa, synthetic construct
VGKGAVHDVKD

SEQ ID NO: 17003 - protein, 8 aa, synthetic construct
GSKLKKKK

SEQ ID NO: 17004 - protein, 8 aa, synthetic construct
EKKKKKKG

SEQ ID NO: 17005 - protein, 9 aa, synthetic construct
KGVLRVEGF

SEQ ID NO: 17006 - protein, 11 aa, synthetic construct
VAAESGIIKVK

SEQ ID NO: 17007 - protein, 8 aa, synthetic construct
QIFIVYFI

SEQ ID NO: 17008 - protein, 8 aa, synthetic construct
LGLFCRFI

SEQ ID NO: 17009 - protein, 8 aa, synthetic construct
LQEGLAAV

SEQ ID NO: 17010 - protein, 9 aa, synthetic construct
LGLAKRVWS

SEQ ID NO: 17011 - protein, 8 aa, synthetic construct
AAKRSVAV

SEQ ID NO: 17012 - protein, 8 aa, synthetic construct
LRQIVLSK

SEQ ID NO: 17013 - protein, 9 aa, synthetic construct
VAAVDTNLT

SEQ ID NO: 17014 - protein, 9 aa, synthetic construct
EKEAVGTAV

SEQ ID NO: 17015 - protein, 8 aa, synthetic construct
QLTDNLTV

SEQ ID NO: 17016 - protein, 8 aa, synthetic construct
EPSSVLVQ

SEQ ID NO: 17017 - protein, 9 aa, synthetic construct
GLGRLMQIK

SEQ ID NO: 17018 - protein, 10 aa, synthetic construct
LGGGYGGGFG

SEQ ID NO: 17019 - protein, 10 aa, synthetic construct
GYGGGLGGGF

SEQ ID NO: 17020 - protein, 8 aa, synthetic construct
LGGPRKDP

SEQ ID NO: 17021 - protein, 9 aa, synthetic construct
LGLHLRSLT

SEQ ID NO: 17022 - protein, 9 aa, synthetic construct
LDIEVAYGL

SEQ ID NO: 17023 - protein, 9 aa, synthetic construct
IDENLGPVA

SEQ ID NO: 17024 - protein, 11 aa, synthetic construct
LGLPAVSSTIC

SEQ ID NO: 17025 - protein, 10 aa, synthetic construct
GLLSGEHAYL

SEQ ID NO: 17026 - protein, 9 aa, synthetic construct
IQHDTIGYL

SEQ ID NO: 17027 - protein, 9 aa, synthetic construct
DIAVKVDQI

SEQ ID NO: 17028 - protein, 9 aa, synthetic construct
GLLDKIRGM

SEQ ID NO: 17029 - protein, 9 aa, synthetic construct
IVAEIIKKV

SEQ ID NO: 17030 - protein, 9 aa, synthetic construct
LAVPAQDLL

SEQ ID NO: 17031 - protein, 9 aa, synthetic construct
VGIAVSTDY

SEQ ID NO: 17032 - protein, 9 aa, synthetic construct
GLKSMIKEV

SEQ ID NO: 17033 - protein, 9 aa, synthetic construct
VAKPAVPDR

SEQ ID NO: 17034 - protein, 9 aa, synthetic construct
EREYKVIGL

SEQ ID NO: 17035 - protein, 9 aa, synthetic construct
VFMKQILGL

SEQ ID NO: 17036 - protein, 11 aa, synthetic construct
GIINIVSAGIL

SEQ ID NO: 17037 - protein, 9 aa, synthetic construct
IGWVLRAAL

SEQ ID NO: 17038 - protein, 9 aa, synthetic construct
GLLQKQKEL

SEQ ID NO: 17039 - protein, 9 aa, synthetic construct
VAKPASAEV

SEQ ID NO: 17040 - protein, 8 aa, synthetic construct
VAILSQEE

SEQ ID NO: 17041 - protein, 9 aa, synthetic construct
GLGIAISEE

SEQ ID NO: 17042 - protein, 9 aa, synthetic construct
QTILGVPSL

SEQ ID NO: 17043 - protein, 8 aa, synthetic construct
LAVRIHSI

SEQ ID NO: 17044 - protein, 7 aa, synthetic construct
AVLAYSN

SEQ ID NO: 17045 - protein, 9 aa, synthetic construct
GLVSQQLPW

SEQ ID NO: 17046 - protein, 10 aa, synthetic construct
GFPKSFLSGL

SEQ ID NO: 17047 - protein, 9 aa, synthetic construct
AVDQEGRII

SEQ ID NO: 17048 - protein, 8 aa, synthetic construct
VAPSILFD

SEQ ID NO: 17049 - protein, 8 aa, synthetic construct
GITLPVDF

SEQ ID NO: 17050 - protein, 10 aa, synthetic construct
LSGENPFATV

SEQ ID NO: 17051 - protein, 9 aa, synthetic construct
VIGTNAVSI

SEQ ID NO: 17052 - protein, 9 aa, synthetic construct
SDSGLLQQV

SEQ ID NO: 17053 - protein, 11 aa, synthetic construct
LGTEGSGRHGP

SEQ ID NO: 17054 - protein, 10 aa, synthetic construct
GLDPGLDHML

SEQ ID NO: 17055 - protein, 10 aa, synthetic construct
LRMVRPGAQA

SEQ ID NO: 17056 - protein, 10 aa, synthetic construct
ALGLALVAEE

SEQ ID NO: 17057 - protein, 9 aa, synthetic construct
VLGLVMLSV

SEQ ID NO: 17058 - protein, 10 aa, synthetic construct
VAYKQKHDAA

SEQ ID NO: 17059 - protein, 9 aa, synthetic construct
TVTGFDLWL

SEQ ID NO: 17060 - protein, 11 aa, synthetic construct
LGPAVGYLLGG

SEQ ID NO: 17061 - protein, 9 aa, synthetic construct
TGLYDIFFL

SEQ ID NO: 17062 - protein, 8 aa, synthetic construct
TKMTVTTV

SEQ ID NO: 17063 - protein, 9 aa, synthetic construct
ERGAYKIYV

SEQ ID NO: 17064 - protein, 10 aa, synthetic construct
GLEAMDAFTR

SEQ ID NO: 17065 - protein, 9 aa, synthetic construct
LGMPWPLTL

SEQ ID NO: 17066 - protein, 11 aa, synthetic construct
AVMLPTGGPPL

SEQ ID NO: 17067 - protein, 9 aa, synthetic construct
LGYMKINTL

SEQ ID NO: 17068 - protein, 9 aa, synthetic construct
GMDPERLKA

SEQ ID NO: 17069 - protein, 8 aa, synthetic construct
TLPSAMIV

SEQ ID NO: 17070 - protein, 10 aa, synthetic construct
MGALATYIFL

SEQ ID NO: 17071 - protein, 9 aa, synthetic construct
MFGLFPPKQ

SEQ ID NO: 17072 - protein, 9 aa, synthetic construct
GMIFFLSHL

SEQ ID NO: 17073 - protein, 9 aa, synthetic construct
GMYPQLALH

SEQ ID NO: 17074 - protein, 10 aa, synthetic construct
ASVTRAVFGE

SEQ ID NO: 17075 - protein, 8 aa, synthetic construct
SFQNLVAI

SEQ ID NO: 17076 - protein, 8 aa, synthetic construct
FNGSESIK

SEQ ID NO: 17077 - protein, 13 aa, synthetic construct
GGGLPGALFSEAV

SEQ ID NO: 17078 - protein, 10 aa, synthetic construct
PPVITWYKNG

SEQ ID NO: 17079 - protein, 9 aa, synthetic construct
GPAAAASIS

SEQ ID NO: 17080 - protein, 9 aa, synthetic construct
EAGQVGAVL

SEQ ID NO: 17081 - protein, 8 aa, synthetic construct
GPQPAGSL

SEQ ID NO: 17082 - protein, 9 aa, synthetic construct
GPGAPLISL

SEQ ID NO: 17083 - protein, 9 aa, synthetic construct
APGLRMDAL

SEQ ID NO: 17084 - protein, 9 aa, synthetic construct
AGPLPGPAL

SEQ ID NO: 17085 - protein, 9 aa, synthetic construct
PGARPLVLS

SEQ ID NO: 17086 - protein, 10 aa, synthetic construct
GPAPRGPQAP

SEQ ID NO: 17087 - protein, 9 aa, synthetic construct
PQPPLAMPP

SEQ ID NO: 17088 - protein, 8 aa, synthetic construct
GPRKESQL

SEQ ID NO: 17089 - protein, 8 aa, synthetic construct
GPAMAGPL

SEQ ID NO: 17090 - protein, 11 aa, synthetic construct
GKPELQGTVEL

SEQ ID NO: 17091 - protein, 10 aa, synthetic construct
NHMAKALKII

SEQ ID NO: 17092 - protein, 9 aa, synthetic construct
GPSERTLSI

SEQ ID NO: 17093 - protein, 10 aa, synthetic construct
IHSNPGDTGY

SEQ ID NO: 17094 - protein, 9 aa, synthetic construct
SLESGFPAF

SEQ ID NO: 17095 - protein, 9 aa, synthetic construct
TVEGFDAYF

SEQ ID NO: 17096 - protein, 9 aa, synthetic construct
GGFGPGKMD

SEQ ID NO: 17097 - protein, 11 aa, synthetic construct
GPGLSWLTAAL

SEQ ID NO: 17098 - protein, 9 aa, synthetic construct
GPQSPPTPL

SEQ ID NO: 17099 - protein, 8 aa, synthetic construct
GPWKVISL

SEQ ID NO: 17100 - protein, 10 aa, synthetic construct
GPHGPSFARV

SEQ ID NO: 17101 - protein, 9 aa, synthetic construct
DLVESQTEV

SEQ ID NO: 17102 - protein, 9 aa, synthetic construct
FTVAAVQQT

SEQ ID NO: 17103 - protein, 10 aa, synthetic construct
PGLKMLRAPG

SEQ ID NO: 17104 - protein, 10 aa, synthetic construct
GPRNLFSAGL

SEQ ID NO: 17105 - protein, 10 aa, synthetic construct
PGLNFGSVQL

SEQ ID NO: 17106 - protein, 9 aa, synthetic construct
TAVPGSLPM

SEQ ID NO: 17107 - protein, 11 aa, synthetic construct
EGLGMYIKSTY

SEQ ID NO: 17108 - protein, 11 aa, synthetic construct
GPIGPPGSPGL

SEQ ID NO: 17109 - protein, 8 aa, synthetic construct
QKQLTKTL

SEQ ID NO: 17110 - protein, 10 aa, synthetic construct
GPGTKSPALL

SEQ ID NO: 17111 - protein, 9 aa, synthetic construct
GFLLQQKRI

SEQ ID NO: 17112 - protein, 12 aa, synthetic construct
GPPGLAGFPGAK

SEQ ID NO: 17113 - protein, 10 aa, synthetic construct
TPPAAELTLK

SEQ ID NO: 17114 - protein, 11 aa, synthetic construct
PGPKGVPGFKG

SEQ ID NO: 17115 - protein, 10 aa, synthetic construct
FAGPGQKFTL

SEQ ID NO: 17116 - protein, 11 aa, synthetic construct
GPQLAGCGGSG

SEQ ID NO: 17117 - protein, 8 aa, synthetic construct
QKRDFRQL

SEQ ID NO: 17118 - protein, 10 aa, synthetic construct
ALHLQANHLG

SEQ ID NO: 17119 - protein, 9 aa, synthetic construct
RPGLRTEGL

SEQ ID NO: 17120 - protein, 12 aa, synthetic construct
LKGHPLPGLLSR

SEQ ID NO: 17121 - protein, 9 aa, synthetic construct
LGPRKAGLI

SEQ ID NO: 17122 - protein, 10 aa, synthetic construct
PGRLICLGPL

SEQ ID NO: 17123 - protein, 11 aa, synthetic construct
ISAGPRAPSEL

SEQ ID NO: 17124 - protein, 9 aa, synthetic construct
TIHRLESEL

SEQ ID NO: 17125 - protein, 12 aa, synthetic construct
PAVSAPVGASEI

SEQ ID NO: 17126 - protein, 9 aa, synthetic construct
LFYGSIIFM

SEQ ID NO: 17127 - protein, 9 aa, synthetic construct
GRGDVLVLR

SEQ ID NO: 17128 - protein, 9 aa, synthetic construct
NQGKGIRVL

SEQ ID NO: 17129 - protein, 8 aa, synthetic construct
HLSFLRVL

SEQ ID NO: 17130 - protein, 9 aa, synthetic construct
PSGRIRSVL

SEQ ID NO: 17131 - protein, 10 aa, synthetic construct
GGEGLRNVAL

SEQ ID NO: 17132 - protein, 9 aa, synthetic construct
APGSPFSIT

SEQ ID NO: 17133 - protein, 9 aa, synthetic construct
GPSFTSKGL

SEQ ID NO: 17134 - protein, 9 aa, synthetic construct
SPGGPNGII

SEQ ID NO: 17135 - protein, 9 aa, synthetic construct
QEASGPDRL

SEQ ID NO: 17136 - protein, 10 aa, synthetic construct
GPPALPPAIP

SEQ ID NO: 17137 - protein, 10 aa, synthetic construct
GPTAEKSVPY

SEQ ID NO: 17138 - protein, 10 aa, synthetic construct
PASGAPSPLL

SEQ ID NO: 17139 - protein, 8 aa, synthetic construct
IMEKLVAY

SEQ ID NO: 17140 - protein, 8 aa, synthetic construct
NKPSPVTY

SEQ ID NO: 17141 - protein, 9 aa, synthetic construct
GWPITDSVI

SEQ ID NO: 17142 - protein, 9 aa, synthetic construct
YLCISFEYS

SEQ ID NO: 17143 - protein, 9 aa, synthetic construct
VEEVGPYTY

SEQ ID NO: 17144 - protein, 8 aa, synthetic construct
QTNISMYF

SEQ ID NO: 17145 - protein, 9 aa, synthetic construct
LGMMLGLCY

SEQ ID NO: 17146 - protein, 10 aa, synthetic construct
QGDSEHSLKF

SEQ ID NO: 17147 - protein, 9 aa, synthetic construct
ANFCIFVET

SEQ ID NO: 17148 - protein, 11 aa, synthetic construct
GGAVQGPSAAL

SEQ ID NO: 17149 - protein, 8 aa, synthetic construct
AFNKFSTL

SEQ ID NO: 17150 - protein, 8 aa, synthetic construct
QGLFLQLN

SEQ ID NO: 17151 - protein, 9 aa, synthetic construct
QFGFLMEVS

SEQ ID NO: 17152 - protein, 8 aa, synthetic construct
NAFLNLVQ

SEQ ID NO: 17153 - protein, 8 aa, synthetic construct
VNFAETLD

SEQ ID NO: 17154 - protein, 12 aa, synthetic construct
GAGPSVAAVREI

SEQ ID NO: 17155 - protein, 8 aa, synthetic construct
NACILPLL

SEQ ID NO: 17156 - protein, 9 aa, synthetic construct
LGQEIRTVY

SEQ ID NO: 17157 - protein, 8 aa, synthetic construct
ANIKIWVL

SEQ ID NO: 17158 - protein, 8 aa, synthetic construct
GQLLMQPV

SEQ ID NO: 17159 - protein, 10 aa, synthetic construct
LNAIMNKNST

SEQ ID NO: 17160 - protein, 9 aa, synthetic construct
VINASLTSI

SEQ ID NO: 17161 - protein, 9 aa, synthetic construct
KTAFCTAVV

SEQ ID NO: 17162 - protein, 9 aa, synthetic construct
GITMYNKAV

SEQ ID NO: 17163 - protein, 8 aa, synthetic construct
GHLQVRLV

SEQ ID NO: 17164 - protein, 8 aa, synthetic construct
LNASLKTL

SEQ ID NO: 17165 - protein, 9 aa, synthetic construct
ALNNPIISQ

SEQ ID NO: 17166 - protein, 14 aa, synthetic construct
AGGNVVDAGVGAAL

SEQ ID NO: 17167 - protein, 8 aa, synthetic construct
GQAIPLVV

SEQ ID NO: 17168 - protein, 10 aa, synthetic construct
QGQIQLISAG

SEQ ID NO: 17169 - protein, 9 aa, synthetic construct
CVLPLNVVN

SEQ ID NO: 17170 - protein, 9 aa, synthetic construct
VEHRSRNHL

SEQ ID NO: 17171 - protein, 8 aa, synthetic construct
VQGTGLTV

SEQ ID NO: 17172 - protein, 8 aa, synthetic construct
TNAIFTSL

SEQ ID NO: 17173 - protein, 8 aa, synthetic construct
VCGQIIPV

SEQ ID NO: 17174 - protein, 8 aa, synthetic construct
LGNIIHNL

SEQ ID NO: 17175 - protein, 8 aa, synthetic construct
ANVTAIVS

SEQ ID NO: 17176 - protein, 10 aa, synthetic construct
ANVLTMEPIV

SEQ ID NO: 17177 - protein, 9 aa, synthetic construct
VANVSIGAM

SEQ ID NO: 17178 - protein, 8 aa, synthetic construct
VVGQMIYL

SEQ ID NO: 17179 - protein, 8 aa, synthetic construct
ANEERKKL

SEQ ID NO: 17180 - protein, 8 aa, synthetic construct
GQTILCIG

SEQ ID NO: 17181 - protein, 9 aa, synthetic construct
LELRSPFQG

SEQ ID NO: 17182 - protein, 8 aa, synthetic construct
AQSNFTLI

SEQ ID NO: 17183 - protein, 9 aa, synthetic construct
RGEGLARVL

SEQ ID NO: 17184 - protein, 11 aa, synthetic construct
LAGGVWRVISK

SEQ ID NO: 17185 - protein, 9 aa, synthetic construct
QERSGVSTF

SEQ ID NO: 17186 - protein, 10 aa, synthetic construct
LWDIHNAKVK

SEQ ID NO: 17187 - protein, 8 aa, synthetic construct
QEVRVMSF

SEQ ID NO: 17188 - protein, 9 aa, synthetic construct
LNFFLGNKV

SEQ ID NO: 17189 - protein, 9 aa, synthetic construct
PPPPRFKNV

SEQ ID NO: 17190 - protein, 9 aa, synthetic construct
TYIWKGGKV

SEQ ID NO: 17191 - protein, 11 aa, synthetic construct
SRMLATLFKDE

SEQ ID NO: 17192 - protein, 9 aa, synthetic construct
LGVSRVKSF

SEQ ID NO: 17193 - protein, 9 aa, synthetic construct
NPQRSIPMG

SEQ ID NO: 17194 - protein, 11 aa, synthetic construct
GEKGAPGVPGM

SEQ ID NO: 17195 - protein, 10 aa, synthetic construct
PPLPGHPPGM

SEQ ID NO: 17196 - protein, 10 aa, synthetic construct
DSFEQAPPEF

SEQ ID NO: 17197 - protein, 9 aa, synthetic construct
RGCLLPASL

SEQ ID NO: 17198 - protein, 10 aa, synthetic construct
ISSPLQAASI

SEQ ID NO: 17199 - protein, 9 aa, synthetic construct
EELDKAYNF

SEQ ID NO: 17200 - protein, 9 aa, synthetic construct
SRNNSKTTL

SEQ ID NO: 17201 - protein, 9 aa, synthetic construct
LRGMNVTLT

SEQ ID NO: 17202 - protein, 11 aa, synthetic construct
GVAASCGWRAP

SEQ ID NO: 17203 - protein, 9 aa, synthetic construct
ENDSLRWQL

SEQ ID NO: 17204 - protein, 10 aa, synthetic construct
DPTNTVSWQI

SEQ ID NO: 17205 - protein, 11 aa, synthetic construct
DMLATDLAYYL

SEQ ID NO: 17206 - protein, 9 aa, synthetic construct
VWARSAMGM

SEQ ID NO: 17207 - protein, 10 aa, synthetic construct
QYDTSTGLGL

SEQ ID NO: 17208 - protein, 9 aa, synthetic construct
PNSYPVYLM

SEQ ID NO: 17209 - protein, 11 aa, synthetic construct
FQGLGPGFSGY

SEQ ID NO: 17210 - protein, 9 aa, synthetic construct
MLMWNLYYM

SEQ ID NO: 17211 - protein, 10 aa, synthetic construct
LTLTQMVGKP

SEQ ID NO: 17212 - protein, 10 aa, synthetic construct
MATTVKLGKP

SEQ ID NO: 17213 - protein, 9 aa, synthetic construct
VRDFGKVIE

SEQ ID NO: 17214 - protein, 9 aa, synthetic construct
TTCLRERLF

SEQ ID NO: 17215 - protein, 9 aa, synthetic construct
FERAAEYQL

SEQ ID NO: 17216 - protein, 11 aa, synthetic construct
DLIHGAPVGKP

SEQ ID NO: 17217 - protein, 10 aa, synthetic construct
MAASLVGKKI

SEQ ID NO: 17218 - protein, 10 aa, synthetic construct
YQKLKRMQPV

SEQ ID NO: 17219 - protein, 9 aa, synthetic construct
HVLRDSSGI

SEQ ID NO: 17220 - protein, 10 aa, synthetic construct
IALCHENSSL

SEQ ID NO: 17221 - protein, 11 aa, synthetic construct
NGPSQPILVRV

SEQ ID NO: 17222 - protein, 9 aa, synthetic construct
PGAFCIPGF

SEQ ID NO: 17223 - protein, 9 aa, synthetic construct
VPMKLNSVK

SEQ ID NO: 17224 - protein, 10 aa, synthetic construct
MGRFGGSGGM

SEQ ID NO: 17225 - protein, 10 aa, synthetic construct
VNHSRSYTKM

SEQ ID NO: 17226 - protein, 10 aa, synthetic construct
MYQGERVAWY

SEQ ID NO: 17227 - protein, 10 aa, synthetic construct
TVCEKSSEGY

SEQ ID NO: 17228 - protein, 10 aa, synthetic construct
FMASPQCVGY

SEQ ID NO: 17229 - protein, 8 aa, synthetic construct
YLRQIMKF

SEQ ID NO: 17230 - protein, 9 aa, synthetic construct
VNRVFSIVL

SEQ ID NO: 17231 - protein, 10 aa, synthetic construct
IVLMTQKTLL

SEQ ID NO: 17232 - protein, 9 aa, synthetic construct
LTGKRFETL

SEQ ID NO: 17233 - protein, 9 aa, synthetic construct
CCILIKFTY

SEQ ID NO: 17234 - protein, 10 aa, synthetic construct
CAVALAVQAF

SEQ ID NO: 17235 - protein, 10 aa, synthetic construct
GRLLISSLTR

SEQ ID NO: 17236 - protein, 11 aa, synthetic construct
DFAAATHPRAF

SEQ ID NO: 17237 - protein, 9 aa, synthetic construct
RGFLGSLRG

SEQ ID NO: 17238 - protein, 11 aa, synthetic construct
LGIGNGTQIYV

SEQ ID NO: 17239 - protein, 9 aa, synthetic construct
LQVKRNDYV

SEQ ID NO: 17240 - protein, 9 aa, synthetic construct
LQRDELVYV

SEQ ID NO: 17241 - protein, 9 aa, synthetic construct
EMMLLLRCL

SEQ ID NO: 17242 - protein, 11 aa, synthetic construct
SSPRGTFLSIF

SEQ ID NO: 17243 - protein, 10 aa, synthetic construct
AAGIFKHLKE

SEQ ID NO: 17244 - protein, 10 aa, synthetic construct
RTKVMPRTPR

SEQ ID NO: 17245 - protein, 10 aa, synthetic construct
VINVREGIAF

SEQ ID NO: 17246 - protein, 9 aa, synthetic construct
IEVDFSKPY

SEQ ID NO: 17247 - protein, 10 aa, synthetic construct
NPICGVSYAL

SEQ ID NO: 17248 - protein, 9 aa, synthetic construct
GTPRHSPTL

SEQ ID NO: 17249 - protein, 8 aa, synthetic construct
VFRHNLEI

SEQ ID NO: 17250 - protein, 9 aa, synthetic construct
HGRGLPVLL

SEQ ID NO: 17251 - protein, 10 aa, synthetic construct
SSWDPTYPHF

SEQ ID NO: 17252 - protein, 12 aa, synthetic construct
QSPGGVSSEVEV

SEQ ID NO: 17253 - protein, 9 aa, synthetic construct
RINGIKQLL

SEQ ID NO: 17254 - protein, 11 aa, synthetic construct
PRTSLKAKQLL

SEQ ID NO: 17255 - protein, 11 aa, synthetic construct
SLPSGIVNFRE

SEQ ID NO: 17256 - protein, 9 aa, synthetic construct
KGRIDLPIK

SEQ ID NO: 17257 - protein, 9 aa, synthetic construct
KDIGRLPLK

SEQ ID NO: 17258 - protein, 10 aa, synthetic construct
LKTSAIEVAG

SEQ ID NO: 17259 - protein, 9 aa, synthetic construct
LPVMEVNQL

SEQ ID NO: 17260 - protein, 9 aa, synthetic construct
NVEKVRLEF

SEQ ID NO: 17261 - protein, 10 aa, synthetic construct
VMVLDNGKII

SEQ ID NO: 17262 - protein, 10 aa, synthetic construct
SGAKPKLSGF

SEQ ID NO: 17263 - protein, 9 aa, synthetic construct
RLEAVVQKL

SEQ ID NO: 17264 - protein, 8 aa, synthetic construct
LVFQKEFK

SEQ ID NO: 17265 - protein, 9 aa, synthetic construct
LRKMQTVKK

SEQ ID NO: 17266 - protein, 9 aa, synthetic construct
LIQNLISSY

SEQ ID NO: 17267 - protein, 9 aa, synthetic construct
KLIRQQIEY

SEQ ID NO: 17268 - protein, 12 aa, synthetic construct
LQRSVLHPPGSG

SEQ ID NO: 17269 - protein, 11 aa, synthetic construct
TIAYPPLLFTY

SEQ ID NO: 17270 - protein, 10 aa, synthetic construct
NQLLVKKALL

SEQ ID NO: 17271 - protein, 10 aa, synthetic construct
PKIMIAALDY

SEQ ID NO: 17272 - protein, 12 aa, synthetic construct
VLVVGIGSGTKM

SEQ ID NO: 17273 - protein, 11 aa, synthetic construct
TAAIIGRTVKM

SEQ ID NO: 17274 - protein, 9 aa, synthetic construct
HVARVLGAL

SEQ ID NO: 17275 - protein, 9 aa, synthetic construct
NKTAKMQFF

SEQ ID NO: 17276 - protein, 8 aa, synthetic construct
QRPTRFQL

SEQ ID NO: 17277 - protein, 8 aa, synthetic construct
FINLREFF

SEQ ID NO: 17278 - protein, 9 aa, synthetic construct
TLVARVLSF

SEQ ID NO: 17279 - protein, 9 aa, synthetic construct
LLGSRIISF

SEQ ID NO: 17280 - protein, 10 aa, synthetic construct
RTHTGEKPFF

SEQ ID NO: 17281 - protein, 10 aa, synthetic construct
SKKLMDLLPK

SEQ ID NO: 17282 - protein, 8 aa, synthetic construct
LRKSPVAK

SEQ ID NO: 17283 - protein, 10 aa, synthetic construct
VQVPLSKRAK

SEQ ID NO: 17284 - protein, 11 aa, synthetic construct
RAGLHERPHKD

SEQ ID NO: 17285 - protein, 9 aa, synthetic construct
GGQRILVGY

SEQ ID NO: 17286 - protein, 9 aa, synthetic construct
YLRCRPAKL

SEQ ID NO: 17287 - protein, 9 aa, synthetic construct
TTPNRLIYL

SEQ ID NO: 17288 - protein, 9 aa, synthetic construct
LRYDGISSL

SEQ ID NO: 17289 - protein, 10 aa, synthetic construct
ALDIARGLRY

SEQ ID NO: 17290 - protein, 11 aa, synthetic construct
GRKNPTAAKTF

SEQ ID NO: 17291 - protein, 9 aa, synthetic construct
IGVPIMLAY

SEQ ID NO: 17292 - protein, 8 aa, synthetic construct
LRHLNLEY

SEQ ID NO: 17293 - protein, 8 aa, synthetic construct
NSLRFHEI

SEQ ID NO: 17294 - protein, 9 aa, synthetic construct
LYAVRGNHV

SEQ ID NO: 17295 - protein, 11 aa, synthetic construct
PSLGRHLGGSG

SEQ ID NO: 17296 - protein, 8 aa, synthetic construct
QPRRLHTF

SEQ ID NO: 17297 - protein, 11 aa, synthetic construct
LVGNTGVLLGM

SEQ ID NO: 17298 - protein, 8 aa, synthetic construct
ILRNLLTK

SEQ ID NO: 17299 - protein, 10 aa, synthetic construct
RGIIRIINPI

SEQ ID NO: 17300 - protein, 9 aa, synthetic construct
ATRVAIVTF

SEQ ID NO: 17301 - protein, 9 aa, synthetic construct
LRGDFVRRL

SEQ ID NO: 17302 - protein, 10 aa, synthetic construct
IRGTKRTSRG

SEQ ID NO: 17303 - protein, 10 aa, synthetic construct
MLGELQRACG

SEQ ID NO: 17304 - protein, 9 aa, synthetic construct
NSAILRWLF

SEQ ID NO: 17305 - protein, 10 aa, synthetic construct
LTLTKCVLHM

SEQ ID NO: 17306 - protein, 9 aa, synthetic construct
MHLRRVRTM

SEQ ID NO: 17307 - protein, 10 aa, synthetic construct
VLVTHGGIEM

SEQ ID NO: 17308 - protein, 9 aa, synthetic construct
LGRVKMEKV

SEQ ID NO: 17309 - protein, 9 aa, synthetic construct
MGRLVLSNK

SEQ ID NO: 17310 - protein, 10 aa, synthetic construct
TGLEAIMETY

SEQ ID NO: 17311 - protein, 9 aa, synthetic construct
RDAANILVM

SEQ ID NO: 17312 - protein, 12 aa, synthetic construct
TVSGASTGVSGL

SEQ ID NO: 17313 - protein, 11 aa, synthetic construct
PGEGVTSLPLV

SEQ ID NO: 17314 - protein, 11 aa, synthetic construct
GGIGVVMGHEL

SEQ ID NO: 17315 - protein, 9 aa, synthetic construct
LNPLGRKGY

SEQ ID NO: 17316 - protein, 11 aa, synthetic construct
FGRNSNICHYT

SEQ ID NO: 17317 - protein, 11 aa, synthetic construct
AGITGARGFLM

SEQ ID NO: 17318 - protein, 9 aa, synthetic construct
LNYQIAVGF

SEQ ID NO: 17319 - protein, 9 aa, synthetic construct
QVTFRGGLF

SEQ ID NO: 17320 - protein, 9 aa, synthetic construct
GCSRLLVTV

SEQ ID NO: 17321 - protein, 9 aa, synthetic construct
LANQSKYNY

SEQ ID NO: 17322 - protein, 7 aa, synthetic construct
EWRYYFF

SEQ ID NO: 17323 - protein, 8 aa, synthetic construct
LELRKNHL

SEQ ID NO: 17324 - protein, 8 aa, synthetic construct
LKREKLNF

SEQ ID NO: 17325 - protein, 10 aa, synthetic construct
RGLSSLWAAV

SEQ ID NO: 17326 - protein, 9 aa, synthetic construct
IINFKPLTY

SEQ ID NO: 17327 - protein, 10 aa, synthetic construct
FSSSHLFNIF

SEQ ID NO: 17328 - protein, 9 aa, synthetic construct
KEIMASEVF

SEQ ID NO: 17329 - protein, 9 aa, synthetic construct
RSEGRLLLR

SEQ ID NO: 17330 - protein, 9 aa, synthetic construct
ERGSLLRRL

SEQ ID NO: 17331 - protein, 9 aa, synthetic construct
VSKNQALKL

SEQ ID NO: 17332 - protein, 9 aa, synthetic construct
SDTARVFTL

SEQ ID NO: 17333 - protein, 10 aa, synthetic construct
MGTAQLQIMA

SEQ ID NO: 17334 - protein, 9 aa, synthetic construct
DGGFQLWTR

SEQ ID NO: 17335 - protein, 9 aa, synthetic construct
FTLARNPMN

SEQ ID NO: 17336 - protein, 9 aa, synthetic construct
SIKARFLRF

SEQ ID NO: 17337 - protein, 9 aa, synthetic construct
IGLTNRVNY

SEQ ID NO: 17338 - protein, 8 aa, synthetic construct
WKSLTNLL

SEQ ID NO: 17339 - protein, 10 aa, synthetic construct
LVGSGILVAH

SEQ ID NO: 17340 - protein, 9 aa, synthetic construct
AKGLQKIAH

SEQ ID NO: 17341 - protein, 9 aa, synthetic construct
LYRTGKSYL

SEQ ID NO: 17342 - protein, 9 aa, synthetic construct
YARYSLKSI

SEQ ID NO: 17343 - protein, 10 aa, synthetic construct
KSFSRLSYLK

SEQ ID NO: 17344 - protein, 9 aa, synthetic construct
QERQLFEYF

SEQ ID NO: 17345 - protein, 11 aa, synthetic construct
FVRGDARPAEI

SEQ ID NO: 17346 - protein, 11 aa, synthetic construct
PKDISSKLPKL

SEQ ID NO: 17347 - protein, 9 aa, synthetic construct
LGFRVLKSY

SEQ ID NO: 17348 - protein, 9 aa, synthetic construct
LKGMLIPCI

SEQ ID NO: 17349 - protein, 9 aa, synthetic construct
LGRVIHLSN

SEQ ID NO: 17350 - protein, 9 aa, synthetic construct
VMILPVLIM

SEQ ID NO: 17351 - protein, 10 aa, synthetic construct
VILAAAVLMF

SEQ ID NO: 17352 - protein, 8 aa, synthetic construct
LRQQVEAL

SEQ ID NO: 17353 - protein, 9 aa, synthetic construct
GRWAEAEGL

SEQ ID NO: 17354 - protein, 9 aa, synthetic construct
RGLMTELQL

SEQ ID NO: 17355 - protein, 12 aa, synthetic construct
RGGRGNEKLLRP

SEQ ID NO: 17356 - protein, 10 aa, synthetic construct
EEGTPLTLYY

SEQ ID NO: 17357 - protein, 10 aa, synthetic construct
FFAKARATFF

SEQ ID NO: 17358 - protein, 9 aa, synthetic construct
GMSEKLGVM

SEQ ID NO: 17359 - protein, 10 aa, synthetic construct
LHALQERRNF

SEQ ID NO: 17360 - protein, 11 aa, synthetic construct
WGLPYGTKPFP

SEQ ID NO: 17361 - protein, 10 aa, synthetic construct
GEAPAHLVPL

SEQ ID NO: 17362 - protein, 10 aa, synthetic construct
QCHIVGAYSY

SEQ ID NO: 17363 - protein, 9 aa, synthetic construct
FGRGLSSGF

SEQ ID NO: 17364 - protein, 10 aa, synthetic construct
LPLMYSGAVF

SEQ ID NO: 17365 - protein, 11 aa, synthetic construct
RFGVSSVAEAM

SEQ ID NO: 17366 - protein, 8 aa, synthetic construct
VRTICSNY

SEQ ID NO: 17367 - protein, 10 aa, synthetic construct
RGYAGSWVSI

SEQ ID NO: 17368 - protein, 11 aa, synthetic construct
HLGPGAACLSL

SEQ ID NO: 17369 - protein, 9 aa, synthetic construct
QKHNISWIS

SEQ ID NO: 17370 - protein, 10 aa, synthetic construct
PVAAQSHWSL

SEQ ID NO: 17371 - protein, 9 aa, synthetic construct
VGGYTRRIL

SEQ ID NO: 17372 - protein, 9 aa, synthetic construct
SSRIFVKIF

SEQ ID NO: 17373 - protein, 9 aa, synthetic construct
GRLYTLIKY

SEQ ID NO: 17374 - protein, 11 aa, synthetic construct
SLFQGAENAYT

SEQ ID NO: 17375 - protein, 9 aa, synthetic construct
TFGMRKSEL

SEQ ID NO: 17376 - protein, 8 aa, synthetic construct
EAESNIAY

SEQ ID NO: 17377 - protein, 9 aa, synthetic construct
MPDKESMYY

SEQ ID NO: 17378 - protein, 8 aa, synthetic construct
DWIQSELY

SEQ ID NO: 17379 - protein, 10 aa, synthetic construct
GSPVAKPKGM

SEQ ID NO: 17380 - protein, 10 aa, synthetic construct
KQKPGGTQSG

SEQ ID NO: 17381 - protein, 10 aa, synthetic construct
NSGIFQRSTN

SEQ ID NO: 17382 - protein, 11 aa, synthetic construct
PQPGDPARASQ

SEQ ID NO: 17383 - protein, 10 aa, synthetic construct
SGNLRMAVML

SEQ ID NO: 17384 - protein, 9 aa, synthetic construct
SSVQGSRSY

SEQ ID NO: 17385 - protein, 8 aa, synthetic construct
DKGAVNGF

SEQ ID NO: 17386 - protein, 9 aa, synthetic construct
MKEVGSHFD

SEQ ID NO: 17387 - protein, 13 aa, synthetic construct
KGGGGGGPGEGFD

SEQ ID NO: 17388 - protein, 8 aa, synthetic construct
SGSKIKVI

SEQ ID NO: 17389 - protein, 9 aa, synthetic construct
SGLFPLKQT

SEQ ID NO: 17390 - protein, 10 aa, synthetic construct
GSLGFLVGRI

SEQ ID NO: 17391 - protein, 8 aa, synthetic construct
SLNNFSGS

SEQ ID NO: 17392 - protein, 9 aa, synthetic construct
GLGNSFSGS

SEQ ID NO: 17393 - protein, 8 aa, synthetic construct
MQEFRASF

SEQ ID NO: 17394 - protein, 10 aa, synthetic construct
LPTAARRRSG

SEQ ID NO: 17395 - protein, 8 aa, synthetic construct
SGSSNYAY

SEQ ID NO: 17396 - protein, 9 aa, synthetic construct
AQSGGEGWG

SEQ ID NO: 17397 - protein, 9 aa, synthetic construct
GSSFGSGYS

SEQ ID NO: 17398 - protein, 11 aa, synthetic construct
DKILEGTETTK

SEQ ID NO: 17399 - protein, 8 aa, synthetic construct
QDAMSFLK

SEQ ID NO: 17400 - protein, 11 aa, synthetic construct
YSGDLLSTIDV

SEQ ID NO: 17401 - protein, 10 aa, synthetic construct
YSGTFDSLPK

SEQ ID NO: 17402 - protein, 9 aa, synthetic construct
SGVYSFEVQ

SEQ ID NO: 17403 - protein, 8 aa, synthetic construct
TENVHWFV

SEQ ID NO: 17404 - protein, 10 aa, synthetic construct
TGEGVGRQMP

SEQ ID NO: 17405 - protein, 8 aa, synthetic construct
IAKSMATY

SEQ ID NO: 17406 - protein, 10 aa, synthetic construct
AGTLLLQLQA

SEQ ID NO: 17407 - protein, 8 aa, synthetic construct
LSICFTCF

SEQ ID NO: 17408 - protein, 9 aa, synthetic construct
FVTSAMTCF

SEQ ID NO: 17409 - protein, 9 aa, synthetic construct
SWDLTPKEY

SEQ ID NO: 17410 - protein, 9 aa, synthetic construct
SEEGLLRLY

SEQ ID NO: 17411 - protein, 11 aa, synthetic construct
GQTGGTIGLLY

SEQ ID NO: 17412 - protein, 9 aa, synthetic construct
GDRGGFNLY

SEQ ID NO: 17413 - protein, 7 aa, synthetic construct
EKEQDNK

SEQ ID NO: 17414 - protein, 13 aa, synthetic construct
ASWNGTEAPGGGA

SEQ ID NO: 17415 - protein, 9 aa, synthetic construct
SPEGMSEIY

SEQ ID NO: 17416 - protein, 13 aa, synthetic construct
ASGGSGAGKAKKS

SEQ ID NO: 17417 - protein, 13 aa, synthetic construct
SAENPLQVGSGAG

SEQ ID NO: 17418 - protein, 10 aa, synthetic construct
TEGFKEIFES

SEQ ID NO: 17419 - protein, 12 aa, synthetic construct
ASASTISPPSSM

SEQ ID NO: 17420 - protein, 9 aa, synthetic construct
TFGAEVVAK

SEQ ID NO: 17421 - protein, 8 aa, synthetic construct
ASFTFKKI

SEQ ID NO: 17422 - protein, 11 aa, synthetic construct
ASLAARVGLGV

SEQ ID NO: 17423 - protein, 9 aa, synthetic construct
GTKLDLLRS

SEQ ID NO: 17424 - protein, 10 aa, synthetic construct
ASLNIPGLPP

SEQ ID NO: 17425 - protein, 10 aa, synthetic construct
SALLNVKAYI

SEQ ID NO: 17426 - protein, 10 aa, synthetic construct
TTVASMNHPR

SEQ ID NO: 17427 - protein, 12 aa, synthetic construct
GTKGPPAPAPAA

SEQ ID NO: 17428 - protein, 9 aa, synthetic construct
KSALPLGKI

SEQ ID NO: 17429 - protein, 9 aa, synthetic construct
LASDYLQLR

SEQ ID NO: 17430 - protein, 12 aa, synthetic construct
SAITVASPSGDY

SEQ ID NO: 17431 - protein, 11 aa, synthetic construct
ASLTDSVNHHS

SEQ ID NO: 17432 - protein, 11 aa, synthetic construct
SALTNQQLPAT

SEQ ID NO: 17433 - protein, 11 aa, synthetic construct
SIATVPPCLTT

SEQ ID NO: 17434 - protein, 10 aa, synthetic construct
MGTEIGVRDF

SEQ ID NO: 17435 - protein, 10 aa, synthetic construct
AMAESVVHSA

SEQ ID NO: 17436 - protein, 12 aa, synthetic construct
SAPSTKAVIAGI

SEQ ID NO: 17437 - protein, 11 aa, synthetic construct
TGQASQPRAPG

SEQ ID NO: 17438 - protein, 9 aa, synthetic construct
SQFSTFSIS

SEQ ID NO: 17439 - protein, 10 aa, synthetic construct
HLRPEPPDTG

SEQ ID NO: 17440 - protein, 12 aa, synthetic construct
ASVDKIFGVIGV

SEQ ID NO: 17441 - protein, 9 aa, synthetic construct
EKIHDLLVC

SEQ ID NO: 17442 - protein, 11 aa, synthetic construct
GTVLPPAVPAI

SEQ ID NO: 17443 - protein, 9 aa, synthetic construct
GTVSKSNRK

SEQ ID NO: 17444 - protein, 9 aa, synthetic construct
LTFGYEYVT

SEQ ID NO: 17445 - protein, 11 aa, synthetic construct
DSGGPLVCRGT

SEQ ID NO: 17446 - protein, 10 aa, synthetic construct
GTMDSGTRRK

SEQ ID NO: 17447 - protein, 10 aa, synthetic construct
GTMDMSITRL

SEQ ID NO: 17448 - protein, 10 aa, synthetic construct
ASMQPSLNPG

SEQ ID NO: 17449 - protein, 9 aa, synthetic construct
GTMQQPRAE

SEQ ID NO: 17450 - protein, 9 aa, synthetic construct
IGGFLYTRP

SEQ ID NO: 17451 - protein, 10 aa, synthetic construct
GVAQAINKKS

SEQ ID NO: 17452 - protein, 8 aa, synthetic construct
GVLQRSHL

SEQ ID NO: 17453 - protein, 12 aa, synthetic construct
EASASLGDRSAK

SEQ ID NO: 17454 - protein, 10 aa, synthetic construct
GDLPAASAAA

SEQ ID NO: 17455 - protein, 9 aa, synthetic construct
RPFNVLPVK

SEQ ID NO: 17456 - protein, 7 aa, synthetic construct
GPRLKVR

SEQ ID NO: 17457 - protein, 8 aa, synthetic construct
RGSSRSHR

SEQ ID NO: 17458 - protein, 8 aa, synthetic construct
GVQNIHFQ

SEQ ID NO: 17459 - protein, 9 aa, synthetic construct
TAVPTEEAY

SEQ ID NO: 17460 - protein, 10 aa, synthetic construct
VGVIDGHIYA

SEQ ID NO: 17461 - protein, 10 aa, synthetic construct
GVLEFQGGGY

SEQ ID NO: 17462 - protein, 9 aa, synthetic construct
GGDMKSFLR

SEQ ID NO: 17463 - protein, 9 aa, synthetic construct
AVEVEENVY

SEQ ID NO: 17464 - protein, 9 aa, synthetic construct
RLKEIITSY

SEQ ID NO: 17465 - protein, 11 aa, synthetic construct
VGIGQVSVKYP

SEQ ID NO: 17466 - protein, 12 aa, synthetic construct
GIVLLLPHGMEG

SEQ ID NO: 17467 - protein, 12 aa, synthetic construct
LVGLSYNATTGR

SEQ ID NO: 17468 - protein, 9 aa, synthetic construct
LVGTPLSAF

SEQ ID NO: 17469 - protein, 12 aa, synthetic construct
GVLSSSQNGPPK

SEQ ID NO: 17470 - protein, 11 aa, synthetic construct
QLPPREIKAGV

SEQ ID NO: 17471 - protein, 9 aa, synthetic construct
GVIHLLDLK

SEQ ID NO: 17472 - protein, 14 aa, synthetic construct
GVIAAAGPQGPGTG

SEQ ID NO: 17473 - protein, 9 aa, synthetic construct
RLVAEFDFR

SEQ ID NO: 17474 - protein, 9 aa, synthetic construct
SSIPLSKIR

SEQ ID NO: 17475 - protein, 9 aa, synthetic construct
MARPSLCTL

SEQ ID NO: 17476 - protein, 9 aa, synthetic construct
VGVLGAATL

SEQ ID NO: 17477 - protein, 10 aa, synthetic construct
IVGHPLDTVK

SEQ ID NO: 17478 - protein, 7 aa, synthetic construct
HLELGRL

SEQ ID NO: 17479 - protein, 8 aa, synthetic construct
VGLRPAQP

SEQ ID NO: 17480 - protein, 8 aa, synthetic construct
GVLKEPKL

SEQ ID NO: 17481 - protein, 8 aa, synthetic construct
ANPLQVLR

SEQ ID NO: 17482 - protein, 9 aa, synthetic construct
GLVQVPQGL

SEQ ID NO: 17483 - protein, 8 aa, synthetic construct
WTPWNASR

SEQ ID NO: 17484 - protein, 9 aa, synthetic construct
KSQRNLVAK

SEQ ID NO: 17485 - protein, 8 aa, synthetic construct
EMKVKIIR

SEQ ID NO: 17486 - protein, 11 aa, synthetic construct
GTVGNTVTAFT

SEQ ID NO: 17487 - protein, 9 aa, synthetic construct
LASRPAGDL

SEQ ID NO: 17488 - protein, 9 aa, synthetic construct
GVSKVSFLG

SEQ ID NO: 17489 - protein, 7 aa, synthetic construct
DKLAAIK

SEQ ID NO: 17490 - protein, 9 aa, synthetic construct
LSGNVLSYT

SEQ ID NO: 17491 - protein, 11 aa, synthetic construct
SVGVDKSTMHI

SEQ ID NO: 17492 - protein, 10 aa, synthetic construct
MGTVAAHVPY

SEQ ID NO: 17493 - protein, 10 aa, synthetic construct
EKLNVDVIDD

SEQ ID NO: 17494 - protein, 12 aa, synthetic construct
VGPVSTVGVTED

SEQ ID NO: 17495 - protein, 11 aa, synthetic construct
STVKMETVVGV

SEQ ID NO: 17496 - protein, 9 aa, synthetic construct
VMESGVLLA

SEQ ID NO: 17497 - protein, 10 aa, synthetic construct
VSFAPLLAHR

SEQ ID NO: 17498 - protein, 9 aa, synthetic construct
YQLAYIRLA

SEQ ID NO: 17499 - protein, 10 aa, synthetic construct
GYLKILPMFF

SEQ ID NO: 17500 - protein, 9 aa, synthetic construct
TPYIAVYPF

SEQ ID NO: 17501 - protein, 9 aa, synthetic construct
SDFSHRLHL

SEQ ID NO: 17502 - protein, 7 aa, synthetic construct
YNKYITL

SEQ ID NO: 17503 - protein, 8 aa, synthetic construct
NSNFKVGY

SEQ ID NO: 17504 - protein, 9 aa, synthetic construct
VCPYNSVEF

SEQ ID NO: 17505 - protein, 9 aa, synthetic construct
EEPGPWLTW

SEQ ID NO: 17506 - protein, 9 aa, synthetic construct
KGIMAQVAM

SEQ ID NO: 17507 - protein, 9 aa, synthetic construct
GYVERGRAG

SEQ ID NO: 17508 - protein, 10 aa, synthetic construct
TDSLPMIVSI

SEQ ID NO: 17509 - protein, 9 aa, synthetic construct
VGEVMGIGR

SEQ ID NO: 17510 - protein, 8 aa, synthetic construct
ADVSRHMN

SEQ ID NO: 17511 - protein, 8 aa, synthetic construct
GMYSENLI

SEQ ID NO: 17512 - protein, 9 aa, synthetic construct
MRAAMFLIF

SEQ ID NO: 17513 - protein, 9 aa, synthetic construct
LGMYETPLF

SEQ ID NO: 17514 - protein, 9 aa, synthetic construct
YIILELMEG

SEQ ID NO: 17515 - protein, 9 aa, synthetic construct
QNHTFLHTV

SEQ ID NO: 17516 - protein, 8 aa, synthetic construct
VGPGMYLV

SEQ ID NO: 17517 - protein, 10 aa, synthetic construct
MAASRTVMAV

SEQ ID NO: 17518 - protein, 9 aa, synthetic construct
YFIGHGEEA

SEQ ID NO: 17519 - protein, 8 aa, synthetic construct
TVGFHNYY

SEQ ID NO: 17520 - protein, 9 aa, synthetic construct
LDLTSLSLE

SEQ ID NO: 17521 - protein, 7 aa, synthetic construct
KEHLWMY

SEQ ID NO: 17522 - protein, 10 aa, synthetic construct
HAAVAELQFC

SEQ ID NO: 17523 - protein, 8 aa, synthetic construct
KSMLSFMY

SEQ ID NO: 17524 - protein, 9 aa, synthetic construct
AHGCVALIT

SEQ ID NO: 17525 - protein, 9 aa, synthetic construct
FFLDRMLAF

SEQ ID NO: 17526 - protein, 9 aa, synthetic construct
QNCSIIQEM

SEQ ID NO: 17527 - protein, 8 aa, synthetic construct
IEEYNHVL

SEQ ID NO: 17528 - protein, 9 aa, synthetic construct
HADGYRSLL

SEQ ID NO: 17529 - protein, 11 aa, synthetic construct
LCPGNPGSVAM

SEQ ID NO: 17530 - protein, 9 aa, synthetic construct
VVLHIEAVF

SEQ ID NO: 17531 - protein, 10 aa, synthetic construct
AGFFGTVVEY

SEQ ID NO: 17532 - protein, 9 aa, synthetic construct
HEAFIIHII

SEQ ID NO: 17533 - protein, 9 aa, synthetic construct
PRASGQELP

SEQ ID NO: 17534 - protein, 8 aa, synthetic construct
PRTNKTEF

SEQ ID NO: 17535 - protein, 9 aa, synthetic construct
RPIQEMEFY

SEQ ID NO: 17536 - protein, 9 aa, synthetic construct
NPVQMLHEF

SEQ ID NO: 17537 - protein, 8 aa, synthetic construct
LKYYEHEF

SEQ ID NO: 17538 - protein, 7 aa, synthetic construct
EYVHQLY

SEQ ID NO: 17539 - protein, 10 aa, synthetic construct
VEVDYNMLAF

SEQ ID NO: 17540 - protein, 9 aa, synthetic construct
EQKGMIEAF

SEQ ID NO: 17541 - protein, 12 aa, synthetic construct
SGASSKSEKNEY

SEQ ID NO: 17542 - protein, 9 aa, synthetic construct
ALLVEHCGF

SEQ ID NO: 17543 - protein, 11 aa, synthetic construct
PPGAEAGSVVL

SEQ ID NO: 17544 - protein, 11 aa, synthetic construct
HQALEDILPFL

SEQ ID NO: 17545 - protein, 8 aa, synthetic construct
PPKSRVLL

SEQ ID NO: 17546 - protein, 9 aa, synthetic construct
LNIQQNSKY

SEQ ID NO: 17547 - protein, 8 aa, synthetic construct
TYLRVFSL

SEQ ID NO: 17548 - protein, 10 aa, synthetic construct
HAITVADFVD

SEQ ID NO: 17549 - protein, 8 aa, synthetic construct
QPFTLQDL

SEQ ID NO: 17550 - protein, 9 aa, synthetic construct
YIMSVIHYF

SEQ ID NO: 17551 - protein, 8 aa, synthetic construct
TFRKFVAL

SEQ ID NO: 17552 - protein, 9 aa, synthetic construct
HIASVREAL

SEQ ID NO: 17553 - protein, 9 aa, synthetic construct
LICYTTNAF

SEQ ID NO: 17554 - protein, 8 aa, synthetic construct
FVEFVKLV

SEQ ID NO: 17555 - protein, 10 aa, synthetic construct
DHAGGTFPVM

SEQ ID NO: 17556 - protein, 8 aa, synthetic construct
MYTAILMF

SEQ ID NO: 17557 - protein, 8 aa, synthetic construct
MHGRILHY

SEQ ID NO: 17558 - protein, 10 aa, synthetic construct
EENSPPWIVF

SEQ ID NO: 17559 - protein, 9 aa, synthetic construct
AVGKYYSYY

SEQ ID NO: 17560 - protein, 9 aa, synthetic construct
HVGLEQLGF

SEQ ID NO: 17561 - protein, 9 aa, synthetic construct
SLAHVVPAY

SEQ ID NO: 17562 - protein, 12 aa, synthetic construct
FDNKAHSGKIKI

SEQ ID NO: 17563 - protein, 12 aa, synthetic construct
SYSSYAHPGSLL

SEQ ID NO: 17564 - protein, 8 aa, synthetic construct
FFEREVKM

SEQ ID NO: 17565 - protein, 9 aa, synthetic construct
YSENTFTEY

SEQ ID NO: 17566 - protein, 12 aa, synthetic construct
CPAHPAVGVAGY

SEQ ID NO: 17567 - protein, 12 aa, synthetic construct
AATTASTTTATM

SEQ ID NO: 17568 - protein, 12 aa, synthetic construct
VPNTAAGEDADV

SEQ ID NO: 17569 - protein, 9 aa, synthetic construct
MQTFYMNLL

SEQ ID NO: 17570 - protein, 11 aa, synthetic construct
HNGGNPSKVPA

SEQ ID NO: 17571 - protein, 11 aa, synthetic construct
KESSSHHPGIA

SEQ ID NO: 17572 - protein, 8 aa, synthetic construct
IQQHLYVI

SEQ ID NO: 17573 - protein, 12 aa, synthetic construct
ASSAGPGPGLSL

SEQ ID NO: 17574 - protein, 9 aa, synthetic construct
VHTEPLDEL

SEQ ID NO: 17575 - protein, 11 aa, synthetic construct
VSEGKWCSLSS

SEQ ID NO: 17576 - protein, 10 aa, synthetic construct
MCHHIGRISS

SEQ ID NO: 17577 - protein, 10 aa, synthetic construct
ANPPVTIDVP

SEQ ID NO: 17578 - protein, 9 aa, synthetic construct
HEELPLCFA

SEQ ID NO: 17579 - protein, 9 aa, synthetic construct
EHILMWLSA

SEQ ID NO: 17580 - protein, 10 aa, synthetic construct
VQEMGGPVSW

SEQ ID NO: 17581 - protein, 9 aa, synthetic construct
HFIQVKQNL

SEQ ID NO: 17582 - protein, 9 aa, synthetic construct
FHDLRQAFR

SEQ ID NO: 17583 - protein, 8 aa, synthetic construct
NEAERVKM

SEQ ID NO: 17584 - protein, 10 aa, synthetic construct
PCSFSAPAAV

SEQ ID NO: 17585 - protein, 8 aa, synthetic construct
HGFKSPRL

SEQ ID NO: 17586 - protein, 10 aa, synthetic construct
HGHLGPGFLL

SEQ ID NO: 17587 - protein, 9 aa, synthetic construct
ATFLAEIHF

SEQ ID NO: 17588 - protein, 9 aa, synthetic construct
HLGNLKKDL

SEQ ID NO: 17589 - protein, 9 aa, synthetic construct
HPKKRPSIF

SEQ ID NO: 17590 - protein, 8 aa, synthetic construct
FHLGTKSL

SEQ ID NO: 17591 - protein, 9 aa, synthetic construct
HIMKLTKGL

SEQ ID NO: 17592 - protein, 9 aa, synthetic construct
HVAFDKKVL

SEQ ID NO: 17593 - protein, 8 aa, synthetic construct
LLGLHPHL

SEQ ID NO: 17594 - protein, 8 aa, synthetic construct
VATHVPLI

SEQ ID NO: 17595 - protein, 9 aa, synthetic construct
IVADHVASY

SEQ ID NO: 17596 - protein, 8 aa, synthetic construct
LHGMIMLR

SEQ ID NO: 17597 - protein, 8 aa, synthetic construct
HPGFIMRL

SEQ ID NO: 17598 - protein, 8 aa, synthetic construct
HNAPELAL

SEQ ID NO: 17599 - protein, 9 aa, synthetic construct
IFGHRIITV

SEQ ID NO: 17600 - protein, 10 aa, synthetic construct
HGSLLALGFT

SEQ ID NO: 17601 - protein, 8 aa, synthetic construct
VIPARVVH

SEQ ID NO: 17602 - protein, 9 aa, synthetic construct
HARSDPLLI

SEQ ID NO: 17603 - protein, 9 aa, synthetic construct
HGSILMSIL

SEQ ID NO: 17604 - protein, 10 aa, synthetic construct
EFASPNGEQF

SEQ ID NO: 17605 - protein, 9 aa, synthetic construct
HTHFYDRLQ

SEQ ID NO: 17606 - protein, 10 aa, synthetic construct
HQSFWEGGRL

SEQ ID NO: 17607 - protein, 10 aa, synthetic construct
GAPGGPALGN

SEQ ID NO: 17608 - protein, 8 aa, synthetic construct
IHELGANG

SEQ ID NO: 17609 - protein, 7 aa, synthetic construct
HLQRLLA

SEQ ID NO: 17610 - protein, 7 aa, synthetic construct
HLQLLRA

SEQ ID NO: 17611 - protein, 9 aa, synthetic construct
YLAHLCVVD

SEQ ID NO: 17612 - protein, 9 aa, synthetic construct
HILPSLAHL

SEQ ID NO: 17613 - protein, 9 aa, synthetic construct
HLHSLRVHL

SEQ ID NO: 17614 - protein, 7 aa, synthetic construct
HLIQQEI

SEQ ID NO: 17615 - protein, 9 aa, synthetic construct
VQVIEHLLG

SEQ ID NO: 17616 - protein, 10 aa, synthetic construct
HLLNAKATGY

SEQ ID NO: 17617 - protein, 9 aa, synthetic construct
EIRSMILHL

SEQ ID NO: 17618 - protein, 10 aa, synthetic construct
SENLSVDLTY

SEQ ID NO: 17619 - protein, 9 aa, synthetic construct
HLIAQELNW

SEQ ID NO: 17620 - protein, 9 aa, synthetic construct
LQVLHIDFL

SEQ ID NO: 17621 - protein, 8 aa, synthetic construct
HLGRYIPF

SEQ ID NO: 17622 - protein, 11 aa, synthetic construct
TFMGSDTVNEF

SEQ ID NO: 17623 - protein, 10 aa, synthetic construct
SLRTGQPLVL

SEQ ID NO: 17624 - protein, 13 aa, synthetic construct
SAGFGGGVPGSTY

SEQ ID NO: 17625 - protein, 7 aa, synthetic construct
LHVVNKH

SEQ ID NO: 17626 - protein, 8 aa, synthetic construct
PVSVRGLH

SEQ ID NO: 17627 - protein, 8 aa, synthetic construct
HLALASPR

SEQ ID NO: 17628 - protein, 9 aa, synthetic construct
LLHCPRPTL

SEQ ID NO: 17629 - protein, 9 aa, synthetic construct
LHLDATKLL

SEQ ID NO: 17630 - protein, 9 aa, synthetic construct
HLLSNTILI

SEQ ID NO: 17631 - protein, 9 aa, synthetic construct
VADLHLYLY

SEQ ID NO: 17632 - protein, 9 aa, synthetic construct
HLYISFGEY

SEQ ID NO: 17633 - protein, 11 aa, synthetic construct
HVIEDSHKKIT

SEQ ID NO: 17634 - protein, 10 aa, synthetic construct
HIQDLAAVSL

SEQ ID NO: 17635 - protein, 11 aa, synthetic construct
RNITMVSYLED

SEQ ID NO: 17636 - protein, 11 aa, synthetic construct
DKEVMKAYIED

SEQ ID NO: 17637 - protein, 8 aa, synthetic construct
HIENLFSD

SEQ ID NO: 17638 - protein, 7 aa, synthetic construct
WYNLEIH

SEQ ID NO: 17639 - protein, 9 aa, synthetic construct
LHLGDFLVF

SEQ ID NO: 17640 - protein, 9 aa, synthetic construct
LLGHLKAKI

SEQ ID NO: 17641 - protein, 9 aa, synthetic construct
LAVHILKAR

SEQ ID NO: 17642 - protein, 11 aa, synthetic construct
AMEVETSVISI

SEQ ID NO: 17643 - protein, 8 aa, synthetic construct
IKLHHIKL

SEQ ID NO: 17644 - protein, 10 aa, synthetic construct
SHHTWPSPAL

SEQ ID NO: 17645 - protein, 10 aa, synthetic construct
KSASIRNDAL

SEQ ID NO: 17646 - protein, 8 aa, synthetic construct
LHLLKTTF

SEQ ID NO: 17647 - protein, 10 aa, synthetic construct
IHAPIANESA

SEQ ID NO: 17648 - protein, 8 aa, synthetic construct
LHLTPKVL

SEQ ID NO: 17649 - protein, 9 aa, synthetic construct
HLLAALAVL

SEQ ID NO: 17650 - protein, 9 aa, synthetic construct
PPRVITSEL

SEQ ID NO: 17651 - protein, 9 aa, synthetic construct
KVWKINASF

SEQ ID NO: 17652 - protein, 9 aa, synthetic construct
HILNVSLSV

SEQ ID NO: 17653 - protein, 9 aa, synthetic construct
LPKHIKDNK

SEQ ID NO: 17654 - protein, 9 aa, synthetic construct
TKVFLRESL

SEQ ID NO: 17655 - protein, 9 aa, synthetic construct
LIHKPESRL

SEQ ID NO: 17656 - protein, 8 aa, synthetic construct
VHRHFLYL

SEQ ID NO: 17657 - protein, 10 aa, synthetic construct
LHFIIGNGIL

SEQ ID NO: 17658 - protein, 10 aa, synthetic construct
HLLLIGVSGA

SEQ ID NO: 17659 - protein, 8 aa, synthetic construct
HLIKISRI

SEQ ID NO: 17660 - protein, 9 aa, synthetic construct
LHILRLALT

SEQ ID NO: 17661 - protein, 9 aa, synthetic construct
MMPPTILID

SEQ ID NO: 17662 - protein, 8 aa, synthetic construct
RKRTEEPD

SEQ ID NO: 17663 - protein, 9 aa, synthetic construct
HINRALKLI

SEQ ID NO: 17664 - protein, 10 aa, synthetic construct
HIQKATSAQL

SEQ ID NO: 17665 - protein, 10 aa, synthetic construct
VHIPLPNLYS

SEQ ID NO: 17666 - protein, 8 aa, synthetic construct
HILNLWVI

SEQ ID NO: 17667 - protein, 10 aa, synthetic construct
PRPTRGPLAT

SEQ ID NO: 17668 - protein, 10 aa, synthetic construct
HLLVSIPLLI

SEQ ID NO: 17669 - protein, 9 aa, synthetic construct
VHITINEIY

SEQ ID NO: 17670 - protein, 9 aa, synthetic construct
THVIENIYL

SEQ ID NO: 17671 - protein, 9 aa, synthetic construct
TDTLLHLVK

SEQ ID NO: 17672 - protein, 9 aa, synthetic construct
HDLLTTLVK

SEQ ID NO: 17673 - protein, 10 aa, synthetic construct
AVLHVGDFAY

SEQ ID NO: 17674 - protein, 8 aa, synthetic construct
HLVHTGER

SEQ ID NO: 17675 - protein, 9 aa, synthetic construct
LHQFSRLLT

SEQ ID NO: 17676 - protein, 11 aa, synthetic construct
MPPVGLDPYAY

SEQ ID NO: 17677 - protein, 9 aa, synthetic construct
EEKASFKTI

SEQ ID NO: 17678 - protein, 9 aa, synthetic construct
HLPSSDPVL

SEQ ID NO: 17679 - protein, 8 aa, synthetic construct
VQHFKVTI

SEQ ID NO: 17680 - protein, 8 aa, synthetic construct
LKVFHNAL

SEQ ID NO: 17681 - protein, 8 aa, synthetic construct
HKAVWNVL

SEQ ID NO: 17682 - protein, 8 aa, synthetic construct
VPPWDRSM

SEQ ID NO: 17683 - protein, 10 aa, synthetic construct
HPAIPTSPHL

SEQ ID NO: 17684 - protein, 10 aa, synthetic construct
KSRTSPYPQY

SEQ ID NO: 17685 - protein, 9 aa, synthetic construct
IHPLCFALE

SEQ ID NO: 17686 - protein, 12 aa, synthetic construct
NAIYSNDFDTYI

SEQ ID NO: 17687 - protein, 11 aa, synthetic construct
ADAFTETGAVY

SEQ ID NO: 17688 - protein, 9 aa, synthetic construct
VQCFDLESY

SEQ ID NO: 17689 - protein, 10 aa, synthetic construct
FMPVETFSEF

SEQ ID NO: 17690 - protein, 12 aa, synthetic construct
YPPTAGAQPSLT

SEQ ID NO: 17691 - protein, 9 aa, synthetic construct
NNLMISYSF

SEQ ID NO: 17692 - protein, 9 aa, synthetic construct
RSFEGSVSF

SEQ ID NO: 17693 - protein, 7 aa, synthetic construct
HPKEEDK

SEQ ID NO: 17694 - protein, 8 aa, synthetic construct
HPQKTHHG

SEQ ID NO: 17695 - protein, 9 aa, synthetic construct
HLLPSQTVL

SEQ ID NO: 17696 - protein, 9 aa, synthetic construct
ISVVSHHCF

SEQ ID NO: 17697 - protein, 10 aa, synthetic construct
CLVSGNNVTW

SEQ ID NO: 17698 - protein, 9 aa, synthetic construct
HPLALRDHI

SEQ ID NO: 17699 - protein, 10 aa, synthetic construct
HPGKDKMIQI

SEQ ID NO: 17700 - protein, 14 aa, synthetic construct
HPAPGLGDGHTQGP

SEQ ID NO: 17701 - protein, 10 aa, synthetic construct
HEMVTKPPVI

SEQ ID NO: 17702 - protein, 11 aa, synthetic construct
QDAANSLREDY

SEQ ID NO: 17703 - protein, 12 aa, synthetic construct
NDGSHFGGYNDF

SEQ ID NO: 17704 - protein, 7 aa, synthetic construct
RITFLKY

SEQ ID NO: 17705 - protein, 10 aa, synthetic construct
YDSDKMFPAF

SEQ ID NO: 17706 - protein, 8 aa, synthetic construct
HTGEKPYH

SEQ ID NO: 17707 - protein, 10 aa, synthetic construct
HPMLPLCPAG

SEQ ID NO: 17708 - protein, 9 aa, synthetic construct
TLHFAELLM

SEQ ID NO: 17709 - protein, 9 aa, synthetic construct
EALIEVEAF

SEQ ID NO: 17710 - protein, 9 aa, synthetic construct
AEPHVLHAY

SEQ ID NO: 17711 - protein, 9 aa, synthetic construct
QIEEETIKF

SEQ ID NO: 17712 - protein, 11 aa, synthetic construct
LEDVSKAPAYT

SEQ ID NO: 17713 - protein, 9 aa, synthetic construct
YQQKVGIMY

SEQ ID NO: 17714 - protein, 10 aa, synthetic construct
VSVYTNGTVF

SEQ ID NO: 17715 - protein, 10 aa, synthetic construct
IENLEALTEL

SEQ ID NO: 17716 - protein, 11 aa, synthetic construct
GRSQLTTASTF

SEQ ID NO: 17717 - protein, 8 aa, synthetic construct
KTLCQYKF

SEQ ID NO: 17718 - protein, 12 aa, synthetic construct
AGRDPSVCAVEF

SEQ ID NO: 17719 - protein, 9 aa, synthetic construct
HPLRDLHPG

SEQ ID NO: 17720 - protein, 10 aa, synthetic construct
HQLRGHLTHY

SEQ ID NO: 17721 - protein, 10 aa, synthetic construct
AMQLNEEALT

SEQ ID NO: 17722 - protein, 8 aa, synthetic construct
HPLVLCLL

SEQ ID NO: 17723 - protein, 8 aa, synthetic construct
HPILSLER

SEQ ID NO: 17724 - protein, 8 aa, synthetic construct
HLPVERTL

SEQ ID NO: 17725 - protein, 9 aa, synthetic construct
HKEMVLKIS

SEQ ID NO: 17726 - protein, 8 aa, synthetic construct
HPSLLLLL

SEQ ID NO: 17727 - protein, 11 aa, synthetic construct
HPQDPYLDKFF

SEQ ID NO: 17728 - protein, 11 aa, synthetic construct
APGGTHVVALV

SEQ ID NO: 17729 - protein, 11 aa, synthetic construct
NSITMTPKVDF

SEQ ID NO: 17730 - protein, 10 aa, synthetic construct
HPILSLERQM

SEQ ID NO: 17731 - protein, 11 aa, synthetic construct
LTCHSWQSQEY

SEQ ID NO: 17732 - protein, 10 aa, synthetic construct
RTPGAEPPTY

SEQ ID NO: 17733 - protein, 8 aa, synthetic construct
LHTKEHMY

SEQ ID NO: 17734 - protein, 10 aa, synthetic construct
GVNIHPVASY

SEQ ID NO: 17735 - protein, 9 aa, synthetic construct
RVFEESIYK

SEQ ID NO: 17736 - protein, 8 aa, synthetic construct
HPPNIPKE

SEQ ID NO: 17737 - protein, 10 aa, synthetic construct
HLPNLASIYH

SEQ ID NO: 17738 - protein, 11 aa, synthetic construct
HEIITIGYNVY

SEQ ID NO: 17739 - protein, 11 aa, synthetic construct
MAALTDLSFMY

SEQ ID NO: 17740 - protein, 9 aa, synthetic construct
RSMYVSTVM

SEQ ID NO: 17741 - protein, 9 aa, synthetic construct
HPLTRKVPF

SEQ ID NO: 17742 - protein, 8 aa, synthetic construct
LMELWVQF

SEQ ID NO: 17743 - protein, 8 aa, synthetic construct
VRLDHYQY

SEQ ID NO: 17744 - protein, 11 aa, synthetic construct
YHILNDPELSF

SEQ ID NO: 17745 - protein, 8 aa, synthetic construct
LSEKTVLL

SEQ ID NO: 17746 - protein, 9 aa, synthetic construct
RERQMAMQI

SEQ ID NO: 17747 - protein, 11 aa, synthetic construct
HLCPRPGPGAL

SEQ ID NO: 17748 - protein, 10 aa, synthetic construct
HAQVLSGHLL

SEQ ID NO: 17749 - protein, 10 aa, synthetic construct
LHGMEALSNL

SEQ ID NO: 17750 - protein, 10 aa, synthetic construct
HPSGLRAILG

SEQ ID NO: 17751 - protein, 10 aa, synthetic construct
HGVTPNLKGF

SEQ ID NO: 17752 - protein, 9 aa, synthetic construct
TSRPHITVV

SEQ ID NO: 17753 - protein, 10 aa, synthetic construct
LSHLERGVVL

SEQ ID NO: 17754 - protein, 8 aa, synthetic construct
HYVYVLLL

SEQ ID NO: 17755 - protein, 9 aa, synthetic construct
NPRWLLEPI

SEQ ID NO: 17756 - protein, 9 aa, synthetic construct
HLVRMLPLR

SEQ ID NO: 17757 - protein, 9 aa, synthetic construct
NLFDNLTEF

SEQ ID NO: 17758 - protein, 8 aa, synthetic construct
HPSIEVNL

SEQ ID NO: 17759 - protein, 9 aa, synthetic construct
KAFSFYSSY

SEQ ID NO: 17760 - protein, 9 aa, synthetic construct
HASQKTVYS

SEQ ID NO: 17761 - protein, 9 aa, synthetic construct
DKYCYDLTY

SEQ ID NO: 17762 - protein, 13 aa, synthetic construct
GQAVDPPSLMATS

SEQ ID NO: 17763 - protein, 12 aa, synthetic construct
DGAPVQPSQVEY

SEQ ID NO: 17764 - protein, 9 aa, synthetic construct
MKNGTLTSF

SEQ ID NO: 17765 - protein, 10 aa, synthetic construct
HPGDISAHLL

SEQ ID NO: 17766 - protein, 9 aa, synthetic construct
DTPITHISF

SEQ ID NO: 17767 - protein, 9 aa, synthetic construct
FSRNLILTY

SEQ ID NO: 17768 - protein, 11 aa, synthetic construct
PHAIPGSILSH

SEQ ID NO: 17769 - protein, 9 aa, synthetic construct
LPHDLASSM

SEQ ID NO: 17770 - protein, 10 aa, synthetic construct
HPVSEGTLMY

SEQ ID NO: 17771 - protein, 9 aa, synthetic construct
HLSPVVTAY

SEQ ID NO: 17772 - protein, 14 aa, synthetic construct
HMLPGALGGLGASI

SEQ ID NO: 17773 - protein, 10 aa, synthetic construct
YSIPQKTDSY

SEQ ID NO: 17774 - protein, 9 aa, synthetic construct
HINPVLVSF

SEQ ID NO: 17775 - protein, 10 aa, synthetic construct
QTLAMLCSVF

SEQ ID NO: 17776 - protein, 11 aa, synthetic construct
YAIAHALHSMH

SEQ ID NO: 17777 - protein, 12 aa, synthetic construct
HPSMQSTPGFTF

SEQ ID NO: 17778 - protein, 12 aa, synthetic construct
PPPDTLASAGDF

SEQ ID NO: 17779 - protein, 8 aa, synthetic construct
YDGRYLIT

SEQ ID NO: 17780 - protein, 12 aa, synthetic construct
GLATPPHKGAPT

SEQ ID NO: 17781 - protein, 10 aa, synthetic construct
FMEKMPPDYI

SEQ ID NO: 17782 - protein, 10 aa, synthetic construct
NFVQFCPDIY

SEQ ID NO: 17783 - protein, 10 aa, synthetic construct
EQHCKMAQEY

SEQ ID NO: 17784 - protein, 11 aa, synthetic construct
HVASLAKPGTF

SEQ ID NO: 17785 - protein, 11 aa, synthetic construct
HQSTRESVLAL

SEQ ID NO: 17786 - protein, 13 aa, synthetic construct
QPMTAPLPGTRPH

SEQ ID NO: 17787 - protein, 9 aa, synthetic construct
LKTWSHWSI

SEQ ID NO: 17788 - protein, 11 aa, synthetic construct
LPSMIPFPPPP

SEQ ID NO: 17789 - protein, 9 aa, synthetic construct
HLDDAWLWG

SEQ ID NO: 17790 - protein, 10 aa, synthetic construct
QDVMNILLQY

SEQ ID NO: 17791 - protein, 11 aa, synthetic construct
QASTGSTQLQL

SEQ ID NO: 17792 - protein, 9 aa, synthetic construct
HQTKPKTMV

SEQ ID NO: 17793 - protein, 8 aa, synthetic construct
HQVEELRL

SEQ ID NO: 17794 - protein, 10 aa, synthetic construct
HMKQLGAGDV

SEQ ID NO: 17795 - protein, 9 aa, synthetic construct
LMEKPDVVV

SEQ ID NO: 17796 - protein, 9 aa, synthetic construct
VLMEKPDVV

SEQ ID NO: 17797 - protein, 8 aa, synthetic construct
HQFSEIKL

SEQ ID NO: 17798 - protein, 9 aa, synthetic construct
QQAHQLPSV

SEQ ID NO: 17799 - protein, 10 aa, synthetic construct
LLLYTGDVVV

SEQ ID NO: 17800 - protein, 8 aa, synthetic construct
NLHQILKV

SEQ ID NO: 17801 - protein, 8 aa, synthetic construct
QHIVTIVH

SEQ ID NO: 17802 - protein, 9 aa, synthetic construct
HSLQHLLYV

SEQ ID NO: 17803 - protein, 8 aa, synthetic construct
KQLNHPNV

SEQ ID NO: 17804 - protein, 9 aa, synthetic construct
IQTLSHKQL

SEQ ID NO: 17805 - protein, 8 aa, synthetic construct
QHILISIK

SEQ ID NO: 17806 - protein, 9 aa, synthetic construct
HGALSRVTL

SEQ ID NO: 17807 - protein, 8 aa, synthetic construct
VKEFHIVQ

SEQ ID NO: 17808 - protein, 9 aa, synthetic construct
HQALSEVEL

SEQ ID NO: 17809 - protein, 9 aa, synthetic construct
LVYAGGRRF

SEQ ID NO: 17810 - protein, 10 aa, synthetic construct
LMSQTGHLGL

SEQ ID NO: 17811 - protein, 10 aa, synthetic construct
CRTGIHTCFV

SEQ ID NO: 17812 - protein, 10 aa, synthetic construct
TSVLSSTVMP

SEQ ID NO: 17813 - protein, 8 aa, synthetic construct
MELLLCHL

SEQ ID NO: 17814 - protein, 10 aa, synthetic construct
QHNPEIGHIL

SEQ ID NO: 17815 - protein, 9 aa, synthetic construct
LYHQPSWIF

SEQ ID NO: 17816 - protein, 8 aa, synthetic construct
CRSRCHLV

SEQ ID NO: 17817 - protein, 9 aa, synthetic construct
ITSLKELGY

SEQ ID NO: 17818 - protein, 10 aa, synthetic construct
PIPSLEAIYL

SEQ ID NO: 17819 - protein, 11 aa, synthetic construct
YIGKGCDRETY

SEQ ID NO: 17820 - protein, 10 aa, synthetic construct
SFHPRLPAPR

SEQ ID NO: 17821 - protein, 11 aa, synthetic construct
QLLAGADEQLL

SEQ ID NO: 17822 - protein, 11 aa, synthetic construct
ALHYMVQTSTF

SEQ ID NO: 17823 - protein, 12 aa, synthetic construct
ETTTLSPEATTF

SEQ ID NO: 17824 - protein, 11 aa, synthetic construct
IPHSRPCAGSF

SEQ ID NO: 17825 - protein, 11 aa, synthetic construct
AAEEVRCLKDY

SEQ ID NO: 17826 - protein, 11 aa, synthetic construct
SHHTQPIMSSF

SEQ ID NO: 17827 - protein, 11 aa, synthetic construct
SQEHPIGDKSF

SEQ ID NO: 17828 - protein, 10 aa, synthetic construct
AWSKMMLQHP

SEQ ID NO: 17829 - protein, 11 aa, synthetic construct
AKSIRASGLIL

SEQ ID NO: 17830 - protein, 9 aa, synthetic construct
IHRIDLKTK

SEQ ID NO: 17831 - protein, 10 aa, synthetic construct
LRHAEVVASI

SEQ ID NO: 17832 - protein, 9 aa, synthetic construct
HVQFLVYQL

SEQ ID NO: 17833 - protein, 10 aa, synthetic construct
KDLVDPFVEV

SEQ ID NO: 17834 - protein, 9 aa, synthetic construct
SAVWKKTSF

SEQ ID NO: 17835 - protein, 9 aa, synthetic construct
MRTEFLMQL

SEQ ID NO: 17836 - protein, 11 aa, synthetic construct
GVHGSLGEVEL

SEQ ID NO: 17837 - protein, 11 aa, synthetic construct
IGGENITAPFL

SEQ ID NO: 17838 - protein, 10 aa, synthetic construct
PRGVDPVVSF

SEQ ID NO: 17839 - protein, 9 aa, synthetic construct
LENHKLSLV

SEQ ID NO: 17840 - protein, 9 aa, synthetic construct
SRGHLIVQL

SEQ ID NO: 17841 - protein, 12 aa, synthetic construct
GVGEPSPATVYY

SEQ ID NO: 17842 - protein, 7 aa, synthetic construct
SHFQSLM

SEQ ID NO: 17843 - protein, 7 aa, synthetic construct
HQSLFMS

SEQ ID NO: 17844 - protein, 7 aa, synthetic construct
LFQSHMA

SEQ ID NO: 17845 - protein, 9 aa, synthetic construct
SQGRPSSMY

SEQ ID NO: 17846 - protein, 8 aa, synthetic construct
MENVYDFY

SEQ ID NO: 17847 - protein, 10 aa, synthetic construct
PPGSPNSLGY

SEQ ID NO: 17848 - protein, 11 aa, synthetic construct
QPSVSSNGMLY

SEQ ID NO: 17849 - protein, 9 aa, synthetic construct
HSETHALLY

SEQ ID NO: 17850 - protein, 9 aa, synthetic construct
EMEHEVILY

SEQ ID NO: 17851 - protein, 9 aa, synthetic construct
NSSMYRIIY

SEQ ID NO: 17852 - protein, 9 aa, synthetic construct
HSLVVGMLI

SEQ ID NO: 17853 - protein, 8 aa, synthetic construct
HSLKRAWA

SEQ ID NO: 17854 - protein, 8 aa, synthetic construct
LSHLERIT

SEQ ID NO: 17855 - protein, 8 aa, synthetic construct
SLQHLMKV

SEQ ID NO: 17856 - protein, 9 aa, synthetic construct
HSLFGRVLL

SEQ ID NO: 17857 - protein, 10 aa, synthetic construct
HLLSLTPPKA

SEQ ID NO: 17858 - protein, 12 aa, synthetic construct
QPSSAPHQPLTL

SEQ ID NO: 17859 - protein, 10 aa, synthetic construct
MFPDRAALYV

SEQ ID NO: 17860 - protein, 9 aa, synthetic construct
HSQGGLRSL

SEQ ID NO: 17861 - protein, 9 aa, synthetic construct
HSTIPVGMI

SEQ ID NO: 17862 - protein, 10 aa, synthetic construct
RPPEMTSESF

SEQ ID NO: 17863 - protein, 8 aa, synthetic construct
VTHSVPVL

SEQ ID NO: 17864 - protein, 8 aa, synthetic construct
HSRYLSLL

SEQ ID NO: 17865 - protein, 8 aa, synthetic construct
HSLMKSDL

SEQ ID NO: 17866 - protein, 9 aa, synthetic construct
HADHTLSSF

SEQ ID NO: 17867 - protein, 9 aa, synthetic construct
PHTPVQHGY

SEQ ID NO: 17868 - protein, 8 aa, synthetic construct
HFFKTINF

SEQ ID NO: 17869 - protein, 9 aa, synthetic construct
DWTLYWTDY

SEQ ID NO: 17870 - protein, 9 aa, synthetic construct
LESHLKEYK

SEQ ID NO: 17871 - protein, 9 aa, synthetic construct
SAHVDILEY

SEQ ID NO: 17872 - protein, 8 aa, synthetic construct
THFYDRLQ

SEQ ID NO: 17873 - protein, 9 aa, synthetic construct
HTMMFSGLR

SEQ ID NO: 17874 - protein, 9 aa, synthetic construct
HTDSSTYRI

SEQ ID NO: 17875 - protein, 9 aa, synthetic construct
HTFWTLAFG

SEQ ID NO: 17876 - protein, 11 aa, synthetic construct
LHAVPSASMAN

SEQ ID NO: 17877 - protein, 9 aa, synthetic construct
HTVKATMPI

SEQ ID NO: 17878 - protein, 10 aa, synthetic construct
NLGKATPTPF

SEQ ID NO: 17879 - protein, 11 aa, synthetic construct
PVNGYFGGSLY

SEQ ID NO: 17880 - protein, 10 aa, synthetic construct
YGRGLSEGRT

SEQ ID NO: 17881 - protein, 10 aa, synthetic construct
PALESRGEGY

SEQ ID NO: 17882 - protein, 10 aa, synthetic construct
HVAFLLAQAT

SEQ ID NO: 17883 - protein, 11 aa, synthetic construct
PATATNHVTEG

SEQ ID NO: 17884 - protein, 10 aa, synthetic construct
PMSYLLSTAD

SEQ ID NO: 17885 - protein, 10 aa, synthetic construct
ARLSTPPQVR

SEQ ID NO: 17886 - protein, 9 aa, synthetic construct
IVDLVHKFY

SEQ ID NO: 17887 - protein, 9 aa, synthetic construct
LPLPRSQSI

SEQ ID NO: 17888 - protein, 12 aa, synthetic construct
DLGGGLKPPGYY

SEQ ID NO: 17889 - protein, 11 aa, synthetic construct
GALDVPHLSNY

SEQ ID NO: 17890 - protein, 10 aa, synthetic construct
RMVYVAFSEF

SEQ ID NO: 17891 - protein, 9 aa, synthetic construct
WVLQDPVYE

SEQ ID NO: 17892 - protein, 10 aa, synthetic construct
SNAARDFVNY

SEQ ID NO: 17893 - protein, 11 aa, synthetic construct
GAMYAPGEVTI

SEQ ID NO: 17894 - protein, 9 aa, synthetic construct
DEQGREAEL

SEQ ID NO: 17895 - protein, 12 aa, synthetic construct
RMGSGIQYGDAS

SEQ ID NO: 17896 - protein, 11 aa, synthetic construct
NGVTLYPYQDS

SEQ ID NO: 17897 - protein, 10 aa, synthetic construct
PRGIGEKLLL

SEQ ID NO: 17898 - protein, 8 aa, synthetic construct
EFQRMKTL

SEQ ID NO: 17899 - protein, 13 aa, synthetic construct
LAAAPGMRGGGGD

SEQ ID NO: 17900 - protein, 9 aa, synthetic construct
ALQLFVDAG

SEQ ID NO: 17901 - protein, 8 aa, synthetic construct
LVNVFDIN

SEQ ID NO: 17902 - protein, 9 aa, synthetic construct
LQALFGAVD

SEQ ID NO: 17903 - protein, 9 aa, synthetic construct
LAAVRSHQG

SEQ ID NO: 17904 - protein, 8 aa, synthetic construct
AALHWVEL

SEQ ID NO: 17905 - protein, 9 aa, synthetic construct
LAARNGHKA

SEQ ID NO: 17906 - protein, 8 aa, synthetic construct
AQEIKDIY

SEQ ID NO: 17907 - protein, 9 aa, synthetic construct
AALPFTKSL

SEQ ID NO: 17908 - protein, 9 aa, synthetic construct
LAAEVGSAL

SEQ ID NO: 17909 - protein, 9 aa, synthetic construct
SFLLTAALY

SEQ ID NO: 17910 - protein, 10 aa, synthetic construct
ALCLMAPNSQ

SEQ ID NO: 17911 - protein, 9 aa, synthetic construct
SLLIDGELY

SEQ ID NO: 17912 - protein, 8 aa, synthetic construct
IAEFNSEL

SEQ ID NO: 17913 - protein, 8 aa, synthetic construct
VAEINSLY

SEQ ID NO: 17914 - protein, 8 aa, synthetic construct
IMNEHLYK

SEQ ID NO: 17915 - protein, 9 aa, synthetic construct
GLVDDVSDL

SEQ ID NO: 17916 - protein, 9 aa, synthetic construct
LAEEKHKAL

SEQ ID NO: 17917 - protein, 11 aa, synthetic construct
ETSKFCSLVDY

SEQ ID NO: 17918 - protein, 10 aa, synthetic construct
IAFPEPQRAS

SEQ ID NO: 17919 - protein, 12 aa, synthetic construct
IAFSDVQSTSAT

SEQ ID NO: 17920 - protein, 9 aa, synthetic construct
AIDVILEGY

SEQ ID NO: 17921 - protein, 9 aa, synthetic construct
LASLANPVL

SEQ ID NO: 17922 - protein, 9 aa, synthetic construct
LALLLQAKL

SEQ ID NO: 17923 - protein, 10 aa, synthetic construct
ALLKRPPNTS

SEQ ID NO: 17924 - protein, 10 aa, synthetic construct
LLAKAFFISS

SEQ ID NO: 17925 - protein, 9 aa, synthetic construct
IALPLGSLF

SEQ ID NO: 17926 - protein, 9 aa, synthetic construct
VVPTAILAF

SEQ ID NO: 17927 - protein, 10 aa, synthetic construct
LAISMASTLK

SEQ ID NO: 17928 - protein, 9 aa, synthetic construct
LALSSPRLL

SEQ ID NO: 17929 - protein, 9 aa, synthetic construct
LALDVVRAL

SEQ ID NO: 17930 - protein, 9 aa, synthetic construct
LAFIGGIEL

SEQ ID NO: 17931 - protein, 10 aa, synthetic construct
LEAVAATEEY

SEQ ID NO: 17932 - protein, 8 aa, synthetic construct
MHREVYAL

SEQ ID NO: 17933 - protein, 11 aa, synthetic construct
LAGGAAAPYPA

SEQ ID NO: 17934 - protein, 9 aa, synthetic construct
LEPRTLGFY

SEQ ID NO: 17935 - protein, 8 aa, synthetic construct
NLAFLWAI

SEQ ID NO: 17936 - protein, 9 aa, synthetic construct
ALDSPAVIF

SEQ ID NO: 17937 - protein, 9 aa, synthetic construct
NDLAGVLAL

SEQ ID NO: 17938 - protein, 9 aa, synthetic construct
LALPHASEV

SEQ ID NO: 17939 - protein, 9 aa, synthetic construct
GRKQLAVNL

SEQ ID NO: 17940 - protein, 9 aa, synthetic construct
LACGPVISV

SEQ ID NO: 17941 - protein, 9 aa, synthetic construct
ITHTALGLA

SEQ ID NO: 17942 - protein, 9 aa, synthetic construct
IASPVVSDI

SEQ ID NO: 17943 - protein, 9 aa, synthetic construct
LASLPQTEL

SEQ ID NO: 17944 - protein, 8 aa, synthetic construct
LAPGVESL

SEQ ID NO: 17945 - protein, 9 aa, synthetic construct
LNEVVSEAF

SEQ ID NO: 17946 - protein, 8 aa, synthetic construct
LKALREVI

SEQ ID NO: 17947 - protein, 9 aa, synthetic construct
IPAVTRSTI

SEQ ID NO: 17948 - protein, 9 aa, synthetic construct
PKVSRTQQL

SEQ ID NO: 17949 - protein, 10 aa, synthetic construct
ISAALVSPAT

SEQ ID NO: 17950 - protein, 9 aa, synthetic construct
ISADRYVAI

SEQ ID NO: 17951 - protein, 9 aa, synthetic construct
YIATALEYV

SEQ ID NO: 17952 - protein, 9 aa, synthetic construct
EITAKFTAL

SEQ ID NO: 17953 - protein, 8 aa, synthetic construct
LIQLPVVY

SEQ ID NO: 17954 - protein, 9 aa, synthetic construct
GLELLTSEF

SEQ ID NO: 17955 - protein, 10 aa, synthetic construct
LGAVGREAFF

SEQ ID NO: 17956 - protein, 8 aa, synthetic construct
LNLHYIFF

SEQ ID NO: 17957 - protein, 8 aa, synthetic construct
LDQIQRYF

SEQ ID NO: 17958 - protein, 9 aa, synthetic construct
LLDRQGAYF

SEQ ID NO: 17959 - protein, 9 aa, synthetic construct
LLHNIDPNF

SEQ ID NO: 17960 - protein, 9 aa, synthetic construct
INLLVPSGF

SEQ ID NO: 17961 - protein, 11 aa, synthetic construct
LLGIFYGSNLP

SEQ ID NO: 17962 - protein, 12 aa, synthetic construct
IGAQQPPATTIP

SEQ ID NO: 17963 - protein, 10 aa, synthetic construct
ILGINPNPEF

SEQ ID NO: 17964 - protein, 9 aa, synthetic construct
ALDVVNLVY

SEQ ID NO: 17965 - protein, 9 aa, synthetic construct
EDSWALLQF

SEQ ID NO: 17966 - protein, 9 aa, synthetic construct
LALLFYSTV

SEQ ID NO: 17967 - protein, 10 aa, synthetic construct
FYHAPPLSAI

SEQ ID NO: 17968 - protein, 9 aa, synthetic construct
VTFDDVALY

SEQ ID NO: 17969 - protein, 9 aa, synthetic construct
RDAHSVITY

SEQ ID NO: 17970 - protein, 11 aa, synthetic construct
LCGAAAGTAEL

SEQ ID NO: 17971 - protein, 9 aa, synthetic construct
ICSRSGDVI

SEQ ID NO: 17972 - protein, 9 aa, synthetic construct
LDKDNLQIL

SEQ ID NO: 17973 - protein, 11 aa, synthetic construct
DLDPGKDEDDL

SEQ ID NO: 17974 - protein, 10 aa, synthetic construct
IDEMIKEAPG

SEQ ID NO: 17975 - protein, 8 aa, synthetic construct
IDHYAAIK

SEQ ID NO: 17976 - protein, 9 aa, synthetic construct
ILGGRYHDL

SEQ ID NO: 17977 - protein, 10 aa, synthetic construct
QSYTRQTGIV

SEQ ID NO: 17978 - protein, 10 aa, synthetic construct
IDIHEVRIGW

SEQ ID NO: 17979 - protein, 10 aa, synthetic construct
LDLHQQLQSR

SEQ ID NO: 17980 - protein, 10 aa, synthetic construct
IDLHKEVIDR

SEQ ID NO: 17981 - protein, 9 aa, synthetic construct
DMPLLEQIS

SEQ ID NO: 17982 - protein, 9 aa, synthetic construct
LEVQDNIQS

SEQ ID NO: 17983 - protein, 11 aa, synthetic construct
QSSPGLEAVAS

SEQ ID NO: 17984 - protein, 8 aa, synthetic construct
RRPCEQIS

SEQ ID NO: 17985 - protein, 10 aa, synthetic construct
AELQAQEGLS

SEQ ID NO: 17986 - protein, 11 aa, synthetic construct
SDLEPRELSSY

SEQ ID NO: 17987 - protein, 13 aa, synthetic construct
SPTTAASPNLSYS

SEQ ID NO: 17988 - protein, 12 aa, synthetic construct
MEPVDAALLSSY

SEQ ID NO: 17989 - protein, 9 aa, synthetic construct
IDQDVQIFM

SEQ ID NO: 17990 - protein, 10 aa, synthetic construct
TRKSATDTSA

SEQ ID NO: 17991 - protein, 8 aa, synthetic construct
TLDKKEAI

SEQ ID NO: 17992 - protein, 8 aa, synthetic construct
LDVTVPCR

SEQ ID NO: 17993 - protein, 9 aa, synthetic construct
LDVNASRQG

SEQ ID NO: 17994 - protein, 8 aa, synthetic construct
IGYVLDTD

SEQ ID NO: 17995 - protein, 8 aa, synthetic construct
LIGYDVTD

SEQ ID NO: 17996 - protein, 8 aa, synthetic construct
LFTEGTLD

SEQ ID NO: 17997 - protein, 8 aa, synthetic construct
LDYVGLDT

SEQ ID NO: 17998 - protein, 9 aa, synthetic construct
DIYKEPDSL

SEQ ID NO: 17999 - protein, 8 aa, synthetic construct
IDHTQYRF

SEQ ID NO: 18000 - protein, 9 aa, synthetic construct
LDPPHQMEL

SEQ ID NO: 18001 - protein, 10 aa, synthetic construct
NKPSVPEEEV

SEQ ID NO: 18002 - protein, 8 aa, synthetic construct
AMLEEALP

SEQ ID NO: 18003 - protein, 10 aa, synthetic construct
SGGCPALPSA

SEQ ID NO: 18004 - protein, 9 aa, synthetic construct
LEAAYEFAD

SEQ ID NO: 18005 - protein, 8 aa, synthetic construct
MKETIQGT

SEQ ID NO: 18006 - protein, 9 aa, synthetic construct
QDEEFYTLP

SEQ ID NO: 18007 - protein, 9 aa, synthetic construct
ELNKIYDAL

SEQ ID NO: 18008 - protein, 11 aa, synthetic construct
DGILPLHDAVA

SEQ ID NO: 18009 - protein, 9 aa, synthetic construct
LEHSISIKI

SEQ ID NO: 18010 - protein, 10 aa, synthetic construct
IENIHLSGKT

SEQ ID NO: 18011 - protein, 9 aa, synthetic construct
LESVSMEII

SEQ ID NO: 18012 - protein, 11 aa, synthetic construct
RSLSSEGGTMP

SEQ ID NO: 18013 - protein, 8 aa, synthetic construct
LEITLSLS

SEQ ID NO: 18014 - protein, 10 aa, synthetic construct
AIEIQKAFAV

SEQ ID NO: 18015 - protein, 9 aa, synthetic construct
PYELLLTAE

SEQ ID NO: 18016 - protein, 8 aa, synthetic construct
EIKQAMLI

SEQ ID NO: 18017 - protein, 9 aa, synthetic construct
AIEYLEQGI

SEQ ID NO: 18018 - protein, 9 aa, synthetic construct
LENYQNLLA

SEQ ID NO: 18019 - protein, 9 aa, synthetic construct
LELKLLDLL

SEQ ID NO: 18020 - protein, 8 aa, synthetic construct
LEIWEAGL

SEQ ID NO: 18021 - protein, 8 aa, synthetic construct
LELCELVA

SEQ ID NO: 18022 - protein, 8 aa, synthetic construct
EIPVQEHL

SEQ ID NO: 18023 - protein, 10 aa, synthetic construct
SPSVADMLEW

SEQ ID NO: 18024 - protein, 9 aa, synthetic construct
ELQIRELIL

SEQ ID NO: 18025 - protein, 9 aa, synthetic construct
EKLEHPVTA

SEQ ID NO: 18026 - protein, 9 aa, synthetic construct
LDTDPSLPP

SEQ ID NO: 18027 - protein, 8 aa, synthetic construct
WKSFELVL

SEQ ID NO: 18028 - protein, 8 aa, synthetic construct
LESLPQAP

SEQ ID NO: 18029 - protein, 9 aa, synthetic construct
TEVPAMTLA

SEQ ID NO: 18030 - protein, 12 aa, synthetic construct
ELTILHTNDVHS

SEQ ID NO: 18031 - protein, 9 aa, synthetic construct
DDLISSSVP

SEQ ID NO: 18032 - protein, 10 aa, synthetic construct
ELLSSRDLLA

SEQ ID NO: 18033 - protein, 9 aa, synthetic construct
ELNEKVEVL

SEQ ID NO: 18034 - protein, 9 aa, synthetic construct
LEVLVNTGF

SEQ ID NO: 18035 - protein, 9 aa, synthetic construct
GIDIICNAE

SEQ ID NO: 18036 - protein, 8 aa, synthetic construct
LIEVLQPL

SEQ ID NO: 18037 - protein, 9 aa, synthetic construct
VETVLPPSS

SEQ ID NO: 18038 - protein, 9 aa, synthetic construct
LEVVASPAS

SEQ ID NO: 18039 - protein, 10 aa, synthetic construct
VFCGMGLTEC

SEQ ID NO: 18040 - protein, 8 aa, synthetic construct
ISFRVYEI

SEQ ID NO: 18041 - protein, 11 aa, synthetic construct
LFCSLSAPPPL

SEQ ID NO: 18042 - protein, 8 aa, synthetic construct
IEDFAEKL

SEQ ID NO: 18043 - protein, 9 aa, synthetic construct
LDFGNQNFE

SEQ ID NO: 18044 - protein, 9 aa, synthetic construct
IVLIDFGLS

SEQ ID NO: 18045 - protein, 9 aa, synthetic construct
IFLGERAAK

SEQ ID NO: 18046 - protein, 8 aa, synthetic construct
LDLFGNTF

SEQ ID NO: 18047 - protein, 9 aa, synthetic construct
FLDPLFLSI

SEQ ID NO: 18048 - protein, 11 aa, synthetic construct
SMEVLKGGTVL

SEQ ID NO: 18049 - protein, 9 aa, synthetic construct
ILMVEIELL

SEQ ID NO: 18050 - protein, 9 aa, synthetic construct
DFLNIPLTI

SEQ ID NO: 18051 - protein, 11 aa, synthetic construct
LFNGGSGCWVS

SEQ ID NO: 18052 - protein, 9 aa, synthetic construct
FIDIRESEI

SEQ ID NO: 18053 - protein, 9 aa, synthetic construct
QYVEAGTYI

SEQ ID NO: 18054 - protein, 10 aa, synthetic construct
TANLGKFLEL

SEQ ID NO: 18055 - protein, 9 aa, synthetic construct
LFQTSETII

SEQ ID NO: 18056 - protein, 9 aa, synthetic construct
FVTDSDLAY

SEQ ID NO: 18057 - protein, 9 aa, synthetic construct
LLFNGSLLL

SEQ ID NO: 18058 - protein, 9 aa, synthetic construct
LFEASQQLL

SEQ ID NO: 18059 - protein, 8 aa, synthetic construct
ILDMTAVL

SEQ ID NO: 18060 - protein, 10 aa, synthetic construct
IFHPSLGINS

SEQ ID NO: 18061 - protein, 8 aa, synthetic construct
FLKAVLRK

SEQ ID NO: 18062 - protein, 9 aa, synthetic construct
IFVLPHEKF

SEQ ID NO: 18063 - protein, 10 aa, synthetic construct
TSPHLFLSTM

SEQ ID NO: 18064 - protein, 11 aa, synthetic construct
LFVAATVLEYF

SEQ ID NO: 18065 - protein, 8 aa, synthetic construct
FLVSHKDI

SEQ ID NO: 18066 - protein, 9 aa, synthetic construct
LFPPEGVSI

SEQ ID NO: 18067 - protein, 9 aa, synthetic construct
IFVSGKVVL

SEQ ID NO: 18068 - protein, 9 aa, synthetic construct
IFIMLLLEL

SEQ ID NO: 18069 - protein, 8 aa, synthetic construct
LFLLVRSK

SEQ ID NO: 18070 - protein, 10 aa, synthetic construct
LFLPRVYVGL

SEQ ID NO: 18071 - protein, 12 aa, synthetic construct
LFISLIGWGVPA

SEQ ID NO: 18072 - protein, 9 aa, synthetic construct
SLFQLPILL

SEQ ID NO: 18073 - protein, 8 aa, synthetic construct
FLGNLKKL

SEQ ID NO: 18074 - protein, 8 aa, synthetic construct
AQVFLQEL

SEQ ID NO: 18075 - protein, 12 aa, synthetic construct
QGTGTPKPRVPF

SEQ ID NO: 18076 - protein, 10 aa, synthetic construct
FKNSYSPLLL

SEQ ID NO: 18077 - protein, 8 aa, synthetic construct
KTKEYIFL

SEQ ID NO: 18078 - protein, 8 aa, synthetic construct
LFDQYKII

SEQ ID NO: 18079 - protein, 10 aa, synthetic construct
LGAEVQGGRE

SEQ ID NO: 18080 - protein, 11 aa, synthetic construct
LQLLMNASKES

SEQ ID NO: 18081 - protein, 10 aa, synthetic construct
AIGLLDVDVY

SEQ ID NO: 18082 - protein, 8 aa, synthetic construct
GYNDAEIL

SEQ ID NO: 18083 - protein, 8 aa, synthetic construct
YGEENGIL

SEQ ID NO: 18084 - protein, 11 aa, synthetic construct
KEHMIQNEVSI

SEQ ID NO: 18085 - protein, 8 aa, synthetic construct
AVGGFNGS

SEQ ID NO: 18086 - protein, 9 aa, synthetic construct
GSASRSGFG

SEQ ID NO: 18087 - protein, 13 aa, synthetic construct
AVLGAAGTGMVVA

SEQ ID NO: 18088 - protein, 9 aa, synthetic construct
LDIGISATY

SEQ ID NO: 18089 - protein, 9 aa, synthetic construct
IVFAVLYTA

SEQ ID NO: 18090 - protein, 8 aa, synthetic construct
GIKIRNLY

SEQ ID NO: 18091 - protein, 9 aa, synthetic construct
LHDKDRVSV

SEQ ID NO: 18092 - protein, 10 aa, synthetic construct
LIGLVGRAAL

SEQ ID NO: 18093 - protein, 8 aa, synthetic construct
GLIPSQLL

SEQ ID NO: 18094 - protein, 9 aa, synthetic construct
LGPKGTDVL

SEQ ID NO: 18095 - protein, 14 aa, synthetic construct
KESNGLLAGCPGGL

SEQ ID NO: 18096 - protein, 8 aa, synthetic construct
IFIFNVVY

SEQ ID NO: 18097 - protein, 9 aa, synthetic construct
YAKVKITLI

SEQ ID NO: 18098 - protein, 8 aa, synthetic construct
YAIVIPML

SEQ ID NO: 18099 - protein, 9 aa, synthetic construct
YAVFPLATL

SEQ ID NO: 18100 - protein, 8 aa, synthetic construct
HLDELKHI

SEQ ID NO: 18101 - protein, 10 aa, synthetic construct
IHANGGTVIR

SEQ ID NO: 18102 - protein, 8 aa, synthetic construct
IHPTADEK

SEQ ID NO: 18103 - protein, 9 aa, synthetic construct
HIPGATLLQ

SEQ ID NO: 18104 - protein, 11 aa, synthetic construct
LSAIHSKQEQH

SEQ ID NO: 18105 - protein, 8 aa, synthetic construct
LLALKKPE

SEQ ID NO: 18106 - protein, 8 aa, synthetic construct
LLDTDGGF

SEQ ID NO: 18107 - protein, 8 aa, synthetic construct
LLDEMKFS

SEQ ID NO: 18108 - protein, 9 aa, synthetic construct
VCISNVFIL

SEQ ID NO: 18109 - protein, 9 aa, synthetic construct
LLDKIERSK

SEQ ID NO: 18110 - protein, 10 aa, synthetic construct
LLRSNTGLLY

SEQ ID NO: 18111 - protein, 9 aa, synthetic construct
LIHQALVEY

SEQ ID NO: 18112 - protein, 9 aa, synthetic construct
LVLESVPDI

SEQ ID NO: 18113 - protein, 9 aa, synthetic construct
LLKEERLEL

SEQ ID NO: 18114 - protein, 9 aa, synthetic construct
LLLVLPWLS

SEQ ID NO: 18115 - protein, 9 aa, synthetic construct
LIIDFDNFV

SEQ ID NO: 18116 - protein, 9 aa, synthetic construct
LLLDQVQTV

SEQ ID NO: 18117 - protein, 11 aa, synthetic construct
ATSPLAPATAL

SEQ ID NO: 18118 - protein, 8 aa, synthetic construct
MEQTNLII

SEQ ID NO: 18119 - protein, 8 aa, synthetic construct
LPARCTML

SEQ ID NO: 18120 - protein, 10 aa, synthetic construct
ILNTSSSNSL

SEQ ID NO: 18121 - protein, 9 aa, synthetic construct
PFMATENII

SEQ ID NO: 18122 - protein, 9 aa, synthetic construct
IINSTNLCT

SEQ ID NO: 18123 - protein, 9 aa, synthetic construct
LSFLAGHQY

SEQ ID NO: 18124 - protein, 9 aa, synthetic construct
IIIPQTISE

SEQ ID NO: 18125 - protein, 9 aa, synthetic construct
LIPYLQSVI

SEQ ID NO: 18126 - protein, 9 aa, synthetic construct
ILSSGTDDF

SEQ ID NO: 18127 - protein, 9 aa, synthetic construct
VSMLSFISA

SEQ ID NO: 18128 - protein, 11 aa, synthetic construct
LKKNGLLGGRL

SEQ ID NO: 18129 - protein, 11 aa, synthetic construct
IGKKGQNLAKI

SEQ ID NO: 18130 - protein, 9 aa, synthetic construct
VKFVGKLKI

SEQ ID NO: 18131 - protein, 10 aa, synthetic construct
EIQKKLSESR

SEQ ID NO: 18132 - protein, 10 aa, synthetic construct
TGLPTSLLPY

SEQ ID NO: 18133 - protein, 9 aa, synthetic construct
NLLTIVEML

SEQ ID NO: 18134 - protein, 8 aa, synthetic construct
LKPPEQRL

SEQ ID NO: 18135 - protein, 8 aa, synthetic construct
IKHLPLPY

SEQ ID NO: 18136 - protein, 14 aa, synthetic construct
RVFSASGSGTSAEL

SEQ ID NO: 18137 - protein, 13 aa, synthetic construct
LKDDPSVNGVLPN

SEQ ID NO: 18138 - protein, 13 aa, synthetic construct
LKDSSASHPPKSD

SEQ ID NO: 18139 - protein, 12 aa, synthetic construct
IKAFSTQMSINE

SEQ ID NO: 18140 - protein, 8 aa, synthetic construct
LEQLTEQV

SEQ ID NO: 18141 - protein, 9 aa, synthetic construct
ALDLVALVT

SEQ ID NO: 18142 - protein, 9 aa, synthetic construct
VDIALGMEY

SEQ ID NO: 18143 - protein, 9 aa, synthetic construct
TEVLAALIV

SEQ ID NO: 18144 - protein, 9 aa, synthetic construct
LLAAEVFSE

SEQ ID NO: 18145 - protein, 12 aa, synthetic construct
LHGGEPGARGLN

SEQ ID NO: 18146 - protein, 10 aa, synthetic construct
ILLPSNPGDV

SEQ ID NO: 18147 - protein, 8 aa, synthetic construct
LLDDSVME

SEQ ID NO: 18148 - protein, 8 aa, synthetic construct
ELVEEGLL

SEQ ID NO: 18149 - protein, 9 aa, synthetic construct
LLLLDDFKL

SEQ ID NO: 18150 - protein, 10 aa, synthetic construct
LIVKDKTVGV

SEQ ID NO: 18151 - protein, 8 aa, synthetic construct
LDLRYIII

SEQ ID NO: 18152 - protein, 9 aa, synthetic construct
LLDKSKQLF

SEQ ID NO: 18153 - protein, 10 aa, synthetic construct
LLDKDQAVAV

SEQ ID NO: 18154 - protein, 9 aa, synthetic construct
LLTWLTPEV

SEQ ID NO: 18155 - protein, 8 aa, synthetic construct
LIEELWLQ

SEQ ID NO: 18156 - protein, 9 aa, synthetic construct
LLEIPCVIA

SEQ ID NO: 18157 - protein, 9 aa, synthetic construct
ISEVSLDPI

SEQ ID NO: 18158 - protein, 11 aa, synthetic construct
ARRALSLQSVG

SEQ ID NO: 18159 - protein, 11 aa, synthetic construct
ILFAAQRSLHE

SEQ ID NO: 18160 - protein, 9 aa, synthetic construct
INGIFLEYI

SEQ ID NO: 18161 - protein, 9 aa, synthetic construct
GHFQQIKNI

SEQ ID NO: 18162 - protein, 8 aa, synthetic construct
VLGILESL

SEQ ID NO: 18163 - protein, 8 aa, synthetic construct
IIGPLDMK

SEQ ID NO: 18164 - protein, 7 aa, synthetic construct
LLFFSLY

SEQ ID NO: 18165 - protein, 11 aa, synthetic construct
LLGGASAATAA

SEQ ID NO: 18166 - protein, 8 aa, synthetic construct
LIVSNPPY

SEQ ID NO: 18167 - protein, 10 aa, synthetic construct
LLGDGGVGKS

SEQ ID NO: 18168 - protein, 9 aa, synthetic construct
LVSYPFDTV

SEQ ID NO: 18169 - protein, 9 aa, synthetic construct
VEMVYSLLS

SEQ ID NO: 18170 - protein, 10 aa, synthetic construct
LSSNGTVYTV

SEQ ID NO: 18171 - protein, 8 aa, synthetic construct
VIRMDILL

SEQ ID NO: 18172 - protein, 9 aa, synthetic construct
LILLDRLLY

SEQ ID NO: 18173 - protein, 10 aa, synthetic construct
IIGSLLVLSV

SEQ ID NO: 18174 - protein, 9 aa, synthetic construct
IIIISIFNV

SEQ ID NO: 18175 - protein, 10 aa, synthetic construct
ILKSEDSTKI

SEQ ID NO: 18176 - protein, 9 aa, synthetic construct
LNLWTSLFL

SEQ ID NO: 18177 - protein, 10 aa, synthetic construct
LLEEMKATLA

SEQ ID NO: 18178 - protein, 9 aa, synthetic construct
LILPEQHMS

SEQ ID NO: 18179 - protein, 9 aa, synthetic construct
LLPSLQESL

SEQ ID NO: 18180 - protein, 10 aa, synthetic construct
ILPPIHDEKI

SEQ ID NO: 18181 - protein, 9 aa, synthetic construct
LIPVRATCK

SEQ ID NO: 18182 - protein, 9 aa, synthetic construct
PKSLVQAAE

SEQ ID NO: 18183 - protein, 9 aa, synthetic construct
LIQDGMKVI

SEQ ID NO: 18184 - protein, 10 aa, synthetic construct
AVQAGSEIIV

SEQ ID NO: 18185 - protein, 10 aa, synthetic construct
LLQLHAVGGV

SEQ ID NO: 18186 - protein, 9 aa, synthetic construct
SQLYLLFLS

SEQ ID NO: 18187 - protein, 9 aa, synthetic construct
LLSTLEKGV

SEQ ID NO: 18188 - protein, 9 aa, synthetic construct
LTLNGSKLL

SEQ ID NO: 18189 - protein, 9 aa, synthetic construct
VSDLLVLLV

SEQ ID NO: 18190 - protein, 9 aa, synthetic construct
ISEETIKLL

SEQ ID NO: 18191 - protein, 9 aa, synthetic construct
CTGQILKLI

SEQ ID NO: 18192 - protein, 9 aa, synthetic construct
ILETITSLN

SEQ ID NO: 18193 - protein, 10 aa, synthetic construct
DITILGGLDY

SEQ ID NO: 18194 - protein, 11 aa, synthetic construct
LLVLSALAEKL

SEQ ID NO: 18195 - protein, 11 aa, synthetic construct
LVTGIKVVDLL

SEQ ID NO: 18196 - protein, 11 aa, synthetic construct
LLVAKAEIVTI

SEQ ID NO: 18197 - protein, 9 aa, synthetic construct
EHIWEILLI

SEQ ID NO: 18198 - protein, 10 aa, synthetic construct
LAQQTLSSPM

SEQ ID NO: 18199 - protein, 9 aa, synthetic construct
EERTILPMS

SEQ ID NO: 18200 - protein, 8 aa, synthetic construct
IWLKPMLL

SEQ ID NO: 18201 - protein, 9 aa, synthetic construct
LTVITEYLL

SEQ ID NO: 18202 - protein, 9 aa, synthetic construct
LSFIDKDLL

SEQ ID NO: 18203 - protein, 9 aa, synthetic construct
LLDGRRVKL

SEQ ID NO: 18204 - protein, 9 aa, synthetic construct
IILTFQLFL

SEQ ID NO: 18205 - protein, 9 aa, synthetic construct
LIMRIKSCL

SEQ ID NO: 18206 - protein, 9 aa, synthetic construct
KLDMCKLLL

SEQ ID NO: 18207 - protein, 11 aa, synthetic construct
LLTSTGMLGKL

SEQ ID NO: 18208 - protein, 10 aa, synthetic construct
LLMMAKSALR

SEQ ID NO: 18209 - protein, 9 aa, synthetic construct
ILMLQANWL

SEQ ID NO: 18210 - protein, 9 aa, synthetic construct
MLLEGLREL

SEQ ID NO: 18211 - protein, 9 aa, synthetic construct
KFTMHLFKL

SEQ ID NO: 18212 - protein, 8 aa, synthetic construct
EIICSRLL

SEQ ID NO: 18213 - protein, 9 aa, synthetic construct
LPYFVLEIS

SEQ ID NO: 18214 - protein, 8 aa, synthetic construct
PFYMSQQL

SEQ ID NO: 18215 - protein, 9 aa, synthetic construct
LNVYSPAEV

SEQ ID NO: 18216 - protein, 10 aa, synthetic construct
NVPELNTAIY

SEQ ID NO: 18217 - protein, 9 aa, synthetic construct
PTAKQRVID

SEQ ID NO: 18218 - protein, 9 aa, synthetic construct
LPIMVNILD

SEQ ID NO: 18219 - protein, 9 aa, synthetic construct
LLFVPPNID

SEQ ID NO: 18220 - protein, 9 aa, synthetic construct
PSVRELVLD

SEQ ID NO: 18221 - protein, 8 aa, synthetic construct
INLPKHVI

SEQ ID NO: 18222 - protein, 12 aa, synthetic construct
AGKVNTVQFNEE

SEQ ID NO: 18223 - protein, 10 aa, synthetic construct
INPKEAELLD

SEQ ID NO: 18224 - protein, 9 aa, synthetic construct
NLYLEYTLL

SEQ ID NO: 18225 - protein, 10 aa, synthetic construct
IEAIDPEKLN

SEQ ID NO: 18226 - protein, 10 aa, synthetic construct
KVPDVEEVNL

SEQ ID NO: 18227 - protein, 9 aa, synthetic construct
IPGVDPELY

SEQ ID NO: 18228 - protein, 9 aa, synthetic construct
LNEPKDLVY

SEQ ID NO: 18229 - protein, 9 aa, synthetic construct
PAAILHAFL

SEQ ID NO: 18230 - protein, 8 aa, synthetic construct
VEKLNLFL

SEQ ID NO: 18231 - protein, 8 aa, synthetic construct
FVKHMLVI

SEQ ID NO: 18232 - protein, 9 aa, synthetic construct
LPSQNSSVL

SEQ ID NO: 18233 - protein, 10 aa, synthetic construct
LSSSAAQAAL

SEQ ID NO: 18234 - protein, 9 aa, synthetic construct
ISVADPMVL

SEQ ID NO: 18235 - protein, 8 aa, synthetic construct
MSKEPLIL

SEQ ID NO: 18236 - protein, 9 aa, synthetic construct
TTFISVTAY

SEQ ID NO: 18237 - protein, 10 aa, synthetic construct
RDTGSKGVAD

SEQ ID NO: 18238 - protein, 8 aa, synthetic construct
LGPEYTTF

SEQ ID NO: 18239 - protein, 9 aa, synthetic construct
TTTTPPYFF

SEQ ID NO: 18240 - protein, 9 aa, synthetic construct
YEEMFSPNI

SEQ ID NO: 18241 - protein, 8 aa, synthetic construct
TVANPIIL

SEQ ID NO: 18242 - protein, 8 aa, synthetic construct
LKKGYLSF

SEQ ID NO: 18243 - protein, 9 aa, synthetic construct
LPAPVPKYA

SEQ ID NO: 18244 - protein, 9 aa, synthetic construct
LAPKPGLPY

SEQ ID NO: 18245 - protein, 9 aa, synthetic construct
ILAELLHFF

SEQ ID NO: 18246 - protein, 8 aa, synthetic construct
LLAPAVEM

SEQ ID NO: 18247 - protein, 10 aa, synthetic construct
QPGLITMAIL

SEQ ID NO: 18248 - protein, 9 aa, synthetic construct
IPNAQMGQV

SEQ ID NO: 18249 - protein, 10 aa, synthetic construct
LAPNFGRSLP

SEQ ID NO: 18250 - protein, 9 aa, synthetic construct
PAALPFLLL

SEQ ID NO: 18251 - protein, 10 aa, synthetic construct
LPAAGPTAFS

SEQ ID NO: 18252 - protein, 9 aa, synthetic construct
LPPPQPLSL

SEQ ID NO: 18253 - protein, 10 aa, synthetic construct
LPATTLMSLT

SEQ ID NO: 18254 - protein, 10 aa, synthetic construct
LACEPVQVEM

SEQ ID NO: 18255 - protein, 9 aa, synthetic construct
IIPCGITNA

SEQ ID NO: 18256 - protein, 9 aa, synthetic construct
IVCSIPPLL

SEQ ID NO: 18257 - protein, 13 aa, synthetic construct
LPGWGLTGGAVTF

SEQ ID NO: 18258 - protein, 9 aa, synthetic construct
VIVPLEQEY

SEQ ID NO: 18259 - protein, 9 aa, synthetic construct
NQLGDDLVL

SEQ ID NO: 18260 - protein, 10 aa, synthetic construct
LPGASEGIKF

SEQ ID NO: 18261 - protein, 11 aa, synthetic construct
LPGEVLMFILL

SEQ ID NO: 18262 - protein, 11 aa, synthetic construct
LPSLNELASLL

SEQ ID NO: 18263 - protein, 8 aa, synthetic construct
LYFSGMKY

SEQ ID NO: 18264 - protein, 9 aa, synthetic construct
LETIRSVGY

SEQ ID NO: 18265 - protein, 8 aa, synthetic construct
LYYEAKEY

SEQ ID NO: 18266 - protein, 14 aa, synthetic construct
LPDQGQGGAGAAGP

SEQ ID NO: 18267 - protein, 10 aa, synthetic construct
LPDEPHPPFF

SEQ ID NO: 18268 - protein, 11 aa, synthetic construct
LPDFKGGSCKS

SEQ ID NO: 18269 - protein, 9 aa, synthetic construct
SSVPEVLQY

SEQ ID NO: 18270 - protein, 8 aa, synthetic construct
LPEQAKLL

SEQ ID NO: 18271 - protein, 10 aa, synthetic construct
QENVDISTVY

SEQ ID NO: 18272 - protein, 10 aa, synthetic construct
LPEESLLRPA

SEQ ID NO: 18273 - protein, 9 aa, synthetic construct
ISQLEPEVF

SEQ ID NO: 18274 - protein, 11 aa, synthetic construct
LPALEVLDLTY

SEQ ID NO: 18275 - protein, 9 aa, synthetic construct
ITPLESALM

SEQ ID NO: 18276 - protein, 9 aa, synthetic construct
PIIAESLTM

SEQ ID NO: 18277 - protein, 9 aa, synthetic construct
LVTRITMPL

SEQ ID NO: 18278 - protein, 9 aa, synthetic construct
PLPELDPLF

SEQ ID NO: 18279 - protein, 8 aa, synthetic construct
ENKKPTAI

SEQ ID NO: 18280 - protein, 9 aa, synthetic construct
IAAFPAPTI

SEQ ID NO: 18281 - protein, 10 aa, synthetic construct
ITVTLDNNSM

SEQ ID NO: 18282 - protein, 10 aa, synthetic construct
LPRVETVYTY

SEQ ID NO: 18283 - protein, 10 aa, synthetic construct
HQLSSAFPLL

SEQ ID NO: 18284 - protein, 9 aa, synthetic construct
ICQEGKFEY

SEQ ID NO: 18285 - protein, 8 aa, synthetic construct
LQKTLPEY

SEQ ID NO: 18286 - protein, 10 aa, synthetic construct
LCVGLGALVF

SEQ ID NO: 18287 - protein, 10 aa, synthetic construct
LPTQNVKPDF

SEQ ID NO: 18288 - protein, 10 aa, synthetic construct
LPTCLLGLAF

SEQ ID NO: 18289 - protein, 8 aa, synthetic construct
LWWVLLQF

SEQ ID NO: 18290 - protein, 8 aa, synthetic construct
LLMKEAEL

SEQ ID NO: 18291 - protein, 10 aa, synthetic construct
TPLKMAATPL

SEQ ID NO: 18292 - protein, 10 aa, synthetic construct
AMTEADVNPK

SEQ ID NO: 18293 - protein, 9 aa, synthetic construct
PKLGTDQPL

SEQ ID NO: 18294 - protein, 10 aa, synthetic construct
LPEGGSALPK

SEQ ID NO: 18295 - protein, 10 aa, synthetic construct
LPNLANVDLA

SEQ ID NO: 18296 - protein, 12 aa, synthetic construct
LPAVSGSPGAAI

SEQ ID NO: 18297 - protein, 11 aa, synthetic construct
LDSAGPLPAKA

SEQ ID NO: 18298 - protein, 10 aa, synthetic construct
LPSAPSLSFV

SEQ ID NO: 18299 - protein, 10 aa, synthetic construct
LPHLQRSPPD

SEQ ID NO: 18300 - protein, 10 aa, synthetic construct
LAQHGEAEAL

SEQ ID NO: 18301 - protein, 8 aa, synthetic construct
PLHPQGPL

SEQ ID NO: 18302 - protein, 8 aa, synthetic construct
ERYTPLDY

SEQ ID NO: 18303 - protein, 11 aa, synthetic construct
IFAVTPMDYEF

SEQ ID NO: 18304 - protein, 10 aa, synthetic construct
LPPEACSPAL

SEQ ID NO: 18305 - protein, 9 aa, synthetic construct
LPHLMALED

SEQ ID NO: 18306 - protein, 11 aa, synthetic construct
LLPATVPTSRL

SEQ ID NO: 18307 - protein, 9 aa, synthetic construct
LSLPESVSF

SEQ ID NO: 18308 - protein, 9 aa, synthetic construct
LPAASELEW

SEQ ID NO: 18309 - protein, 11 aa, synthetic construct
LLPEDPGAPRG

SEQ ID NO: 18310 - protein, 12 aa, synthetic construct
IGIVSRSGTLTY

SEQ ID NO: 18311 - protein, 9 aa, synthetic construct
LIPIFTDVA

SEQ ID NO: 18312 - protein, 10 aa, synthetic construct
LPGEGKSISY

SEQ ID NO: 18313 - protein, 9 aa, synthetic construct
LLPLQTVAL

SEQ ID NO: 18314 - protein, 8 aa, synthetic construct
ILPLAVTA

SEQ ID NO: 18315 - protein, 9 aa, synthetic construct
LIILPLEFG

SEQ ID NO: 18316 - protein, 9 aa, synthetic construct
LPISLPVNQ

SEQ ID NO: 18317 - protein, 8 aa, synthetic construct
LLQHYEAY

SEQ ID NO: 18318 - protein, 10 aa, synthetic construct
RHSFLKALYY

SEQ ID NO: 18319 - protein, 11 aa, synthetic construct
LPGGGMKMKVF

SEQ ID NO: 18320 - protein, 9 aa, synthetic construct
LIPKPAVFS

SEQ ID NO: 18321 - protein, 13 aa, synthetic construct
PRTLLTGAVGSLL

SEQ ID NO: 18322 - protein, 9 aa, synthetic construct
APLHIVSLI

SEQ ID NO: 18323 - protein, 9 aa, synthetic construct
LHVLISLPA

SEQ ID NO: 18324 - protein, 8 aa, synthetic construct
IPKNVTEL

SEQ ID NO: 18325 - protein, 9 aa, synthetic construct
RTKTTIALL

SEQ ID NO: 18326 - protein, 12 aa, synthetic construct
PLTNILVSTTLL

SEQ ID NO: 18327 - protein, 9 aa, synthetic construct
LRRTPESAF

SEQ ID NO: 18328 - protein, 12 aa, synthetic construct
LLPALLSSGTPL

SEQ ID NO: 18329 - protein, 9 aa, synthetic construct
MRTSYLLLF

SEQ ID NO: 18330 - protein, 9 aa, synthetic construct
LPVEALLYA

SEQ ID NO: 18331 - protein, 11 aa, synthetic construct
VLKGFRNGAVY

SEQ ID NO: 18332 - protein, 9 aa, synthetic construct
IIMPSLVLY

SEQ ID NO: 18333 - protein, 10 aa, synthetic construct
LPLAHQAWPS

SEQ ID NO: 18334 - protein, 9 aa, synthetic construct
LQNTQVRVM

SEQ ID NO: 18335 - protein, 9 aa, synthetic construct
LISNELVSY

SEQ ID NO: 18336 - protein, 9 aa, synthetic construct
LLPSKIKTL

SEQ ID NO: 18337 - protein, 9 aa, synthetic construct
ISSPLLYPT

SEQ ID NO: 18338 - protein, 9 aa, synthetic construct
SRAQESVGF

SEQ ID NO: 18339 - protein, 10 aa, synthetic construct
LPTGTPHALI

SEQ ID NO: 18340 - protein, 9 aa, synthetic construct
PEQIVIHAL

SEQ ID NO: 18341 - protein, 10 aa, synthetic construct
LPFFAGALAL

SEQ ID NO: 18342 - protein, 10 aa, synthetic construct
LPMASERGQL

SEQ ID NO: 18343 - protein, 11 aa, synthetic construct
YEAVARGSFSL

SEQ ID NO: 18344 - protein, 9 aa, synthetic construct
LEPSQLLEM

SEQ ID NO: 18345 - protein, 11 aa, synthetic construct
VPAAGARNQFI

SEQ ID NO: 18346 - protein, 10 aa, synthetic construct
PLQELAMRGL

SEQ ID NO: 18347 - protein, 10 aa, synthetic construct
LGGRLQPSPL

SEQ ID NO: 18348 - protein, 12 aa, synthetic construct
LPKPANTSALTI

SEQ ID NO: 18349 - protein, 8 aa, synthetic construct
IQPQQLVL

SEQ ID NO: 18350 - protein, 9 aa, synthetic construct
IQPTPASPL

SEQ ID NO: 18351 - protein, 10 aa, synthetic construct
STKLSHIDEY

SEQ ID NO: 18352 - protein, 9 aa, synthetic construct
TSELRDPLL

SEQ ID NO: 18353 - protein, 8 aa, synthetic construct
TLGFFLQF

SEQ ID NO: 18354 - protein, 10 aa, synthetic construct
VPAQARLSAI

SEQ ID NO: 18355 - protein, 9 aa, synthetic construct
LERPRENNF

SEQ ID NO: 18356 - protein, 9 aa, synthetic construct
NAIPKRLCL

SEQ ID NO: 18357 - protein, 10 aa, synthetic construct
IVPGNRLKIL

SEQ ID NO: 18358 - protein, 9 aa, synthetic construct
ILPRLVLNT

SEQ ID NO: 18359 - protein, 11 aa, synthetic construct
LLHGGTLAGAL

SEQ ID NO: 18360 - protein, 9 aa, synthetic construct
LPPRQSLTL

SEQ ID NO: 18361 - protein, 9 aa, synthetic construct
LVHESLLTI

SEQ ID NO: 18362 - protein, 9 aa, synthetic construct
PLLPRLVIL

SEQ ID NO: 18363 - protein, 9 aa, synthetic construct
LRLPPVLLL

SEQ ID NO: 18364 - protein, 9 aa, synthetic construct
ILQVHDKEV

SEQ ID NO: 18365 - protein, 11 aa, synthetic construct
LPVGIARYGIL

SEQ ID NO: 18366 - protein, 10 aa, synthetic construct
LLLGPNGQTL

SEQ ID NO: 18367 - protein, 11 aa, synthetic construct
LDSSLLHLKSF

SEQ ID NO: 18368 - protein, 10 aa, synthetic construct
TLQGKWITTF

SEQ ID NO: 18369 - protein, 11 aa, synthetic construct
AKIPNFGVTTF

SEQ ID NO: 18370 - protein, 9 aa, synthetic construct
VGRLLDLLV

SEQ ID NO: 18371 - protein, 10 aa, synthetic construct
LSKNKPLVVE

SEQ ID NO: 18372 - protein, 11 aa, synthetic construct
RLLAVPDPSPM

SEQ ID NO: 18373 - protein, 9 aa, synthetic construct
HLDLGWIAI

SEQ ID NO: 18374 - protein, 9 aa, synthetic construct
ILRMLLSLQ

SEQ ID NO: 18375 - protein, 11 aa, synthetic construct
LSTVRKGSGAI

SEQ ID NO: 18376 - protein, 9 aa, synthetic construct
LNDQVINMY

SEQ ID NO: 18377 - protein, 11 aa, synthetic construct
LEFGSESGVLY

SEQ ID NO: 18378 - protein, 12 aa, synthetic construct
LPSDQATLPSVM

SEQ ID NO: 18379 - protein, 9 aa, synthetic construct
FLTDPIFSS

SEQ ID NO: 18380 - protein, 10 aa, synthetic construct
LAPSPHMELL

SEQ ID NO: 18381 - protein, 10 aa, synthetic construct
LPLAGSPPEM

SEQ ID NO: 18382 - protein, 9 aa, synthetic construct
IPSELHCIV

SEQ ID NO: 18383 - protein, 9 aa, synthetic construct
VGLDVPTAF

SEQ ID NO: 18384 - protein, 10 aa, synthetic construct
PSINALMIFI

SEQ ID NO: 18385 - protein, 9 aa, synthetic construct
IIDTPISEV

SEQ ID NO: 18386 - protein, 11 aa, synthetic construct
LELAILGGLVY

SEQ ID NO: 18387 - protein, 9 aa, synthetic construct
PTLENLENL

SEQ ID NO: 18388 - protein, 8 aa, synthetic construct
LATTFPLL

SEQ ID NO: 18389 - protein, 10 aa, synthetic construct
LPSNKLSGTF

SEQ ID NO: 18390 - protein, 8 aa, synthetic construct
KTTREMPL

SEQ ID NO: 18391 - protein, 10 aa, synthetic construct
IPTGANKGFS

SEQ ID NO: 18392 - protein, 9 aa, synthetic construct
LLKANNTLL

SEQ ID NO: 18393 - protein, 9 aa, synthetic construct
LVPDKMKSY

SEQ ID NO: 18394 - protein, 9 aa, synthetic construct
TFVSDLLPP

SEQ ID NO: 18395 - protein, 9 aa, synthetic construct
IALTEPLTM

SEQ ID NO: 18396 - protein, 9 aa, synthetic construct
LDLPELPFP

SEQ ID NO: 18397 - protein, 10 aa, synthetic construct
LSVFSSFAFL

SEQ ID NO: 18398 - protein, 8 aa, synthetic construct
VLVCPIYT

SEQ ID NO: 18399 - protein, 10 aa, synthetic construct
LPLVVSSLMS

SEQ ID NO: 18400 - protein, 13 aa, synthetic construct
IPVAGLSDSGLYT

SEQ ID NO: 18401 - protein, 10 aa, synthetic construct
GPVGLSLDVF

SEQ ID NO: 18402 - protein, 9 aa, synthetic construct
PLVPDIAQI

SEQ ID NO: 18403 - protein, 11 aa, synthetic construct
IPVTSAKTGSF

SEQ ID NO: 18404 - protein, 9 aa, synthetic construct
LPVPKSLSI

SEQ ID NO: 18405 - protein, 9 aa, synthetic construct
PLSLILASY

SEQ ID NO: 18406 - protein, 7 aa, synthetic construct
VPIVDKI

SEQ ID NO: 18407 - protein, 8 aa, synthetic construct
ANLVPMII

SEQ ID NO: 18408 - protein, 9 aa, synthetic construct
IFTVSRWYF

SEQ ID NO: 18409 - protein, 10 aa, synthetic construct
TRPTPVSVPG

SEQ ID NO: 18410 - protein, 9 aa, synthetic construct
TYLIDIHIQ

SEQ ID NO: 18411 - protein, 11 aa, synthetic construct
SENAVSSSELM

SEQ ID NO: 18412 - protein, 10 aa, synthetic construct
LPPTHPSSII

SEQ ID NO: 18413 - protein, 11 aa, synthetic construct
SGKTGAFALPI

SEQ ID NO: 18414 - protein, 14 aa, synthetic construct
ERAGGGAVGAPVSI

SEQ ID NO: 18415 - protein, 11 aa, synthetic construct
PLYSDLHPVSL

SEQ ID NO: 18416 - protein, 9 aa, synthetic construct
VTYRENSLL

SEQ ID NO: 18417 - protein, 11 aa, synthetic construct
FLTTGRACHFS

SEQ ID NO: 18418 - protein, 9 aa, synthetic construct
DGYLLVLMT

SEQ ID NO: 18419 - protein, 9 aa, synthetic construct
TNFVIAMLL

SEQ ID NO: 18420 - protein, 8 aa, synthetic construct
ISRNHAVL

SEQ ID NO: 18421 - protein, 8 aa, synthetic construct
LIPMIHLQ

SEQ ID NO: 18422 - protein, 9 aa, synthetic construct
LEADLCPQY

SEQ ID NO: 18423 - protein, 9 aa, synthetic construct
IPMTPNGHL

SEQ ID NO: 18424 - protein, 9 aa, synthetic construct
LMTPVVMSS

SEQ ID NO: 18425 - protein, 11 aa, synthetic construct
ALGSAALGAAF

SEQ ID NO: 18426 - protein, 8 aa, synthetic construct
FQLQLQEF

SEQ ID NO: 18427 - protein, 8 aa, synthetic construct
LQANISDT

SEQ ID NO: 18428 - protein, 8 aa, synthetic construct
QIIGIPKI

SEQ ID NO: 18429 - protein, 8 aa, synthetic construct
LQGLIPLK

SEQ ID NO: 18430 - protein, 8 aa, synthetic construct
LQGLLKPL

SEQ ID NO: 18431 - protein, 8 aa, synthetic construct
LHQMCLQL

SEQ ID NO: 18432 - protein, 9 aa, synthetic construct
IPENCLKVV

SEQ ID NO: 18433 - protein, 11 aa, synthetic construct
KAENPGGPPVL

SEQ ID NO: 18434 - protein, 8 aa, synthetic construct
QLFKEKIL

SEQ ID NO: 18435 - protein, 9 aa, synthetic construct
FQLPKLGAL

SEQ ID NO: 18436 - protein, 8 aa, synthetic construct
QHLLLKPI

SEQ ID NO: 18437 - protein, 9 aa, synthetic construct
IQNLVSASL

SEQ ID NO: 18438 - protein, 10 aa, synthetic construct
QKESTLHLVL

SEQ ID NO: 18439 - protein, 11 aa, synthetic construct
LLPRASPDSVL

SEQ ID NO: 18440 - protein, 13 aa, synthetic construct
AGLASSLSHLLVL

SEQ ID NO: 18441 - protein, 9 aa, synthetic construct
QIKLMQAKI

SEQ ID NO: 18442 - protein, 9 aa, synthetic construct
LQLERPGTV

SEQ ID NO: 18443 - protein, 8 aa, synthetic construct
LQLEDLSL

SEQ ID NO: 18444 - protein, 8 aa, synthetic construct
IQMSNLIR

SEQ ID NO: 18445 - protein, 10 aa, synthetic construct
QLPAPDFRAY

SEQ ID NO: 18446 - protein, 11 aa, synthetic construct
AAVNVPMLPGV

SEQ ID NO: 18447 - protein, 8 aa, synthetic construct
LQLQLKKL

SEQ ID NO: 18448 - protein, 10 aa, synthetic construct
LPPPRPLITL

SEQ ID NO: 18449 - protein, 10 aa, synthetic construct
PILVALMLHV

SEQ ID NO: 18450 - protein, 10 aa, synthetic construct
LQRVGLGLAG

SEQ ID NO: 18451 - protein, 11 aa, synthetic construct
ATLPRKGQLVY

SEQ ID NO: 18452 - protein, 10 aa, synthetic construct
PRRRTRGAIY

SEQ ID NO: 18453 - protein, 8 aa, synthetic construct
NTLVEMTL

SEQ ID NO: 18454 - protein, 8 aa, synthetic construct
QLRQYDED

SEQ ID NO: 18455 - protein, 10 aa, synthetic construct
LQTVKSLAGV

SEQ ID NO: 18456 - protein, 8 aa, synthetic construct
VVVQLASL

SEQ ID NO: 18457 - protein, 9 aa, synthetic construct
LAGWLLLLQ

SEQ ID NO: 18458 - protein, 9 aa, synthetic construct
QLWSVLEVP

SEQ ID NO: 18459 - protein, 8 aa, synthetic construct
IQLYARIT

SEQ ID NO: 18460 - protein, 9 aa, synthetic construct
IQELYRSLV

SEQ ID NO: 18461 - protein, 9 aa, synthetic construct
LQYLEKAGL

SEQ ID NO: 18462 - protein, 10 aa, synthetic construct
IQYGRVKATV

SEQ ID NO: 18463 - protein, 9 aa, synthetic construct
PRGPVVPLF

SEQ ID NO: 18464 - protein, 9 aa, synthetic construct
RAALPLPPF

SEQ ID NO: 18465 - protein, 9 aa, synthetic construct
HIKSITNSV

SEQ ID NO: 18466 - protein, 11 aa, synthetic construct
AAAFRCALGGV

SEQ ID NO: 18467 - protein, 10 aa, synthetic construct
TVESSMILNV

SEQ ID NO: 18468 - protein, 8 aa, synthetic construct
QLFRTVHV

SEQ ID NO: 18469 - protein, 10 aa, synthetic construct
LAHVMTLYKT

SEQ ID NO: 18470 - protein, 10 aa, synthetic construct
YGSILSMYVQ

SEQ ID NO: 18471 - protein, 9 aa, synthetic construct
SAFFLRQSF

SEQ ID NO: 18472 - protein, 12 aa, synthetic construct
PAAARPPPLTRS

SEQ ID NO: 18473 - protein, 10 aa, synthetic construct
NLLVIFIPSM

SEQ ID NO: 18474 - protein, 10 aa, synthetic construct
TGSRQVIIRV

SEQ ID NO: 18475 - protein, 9 aa, synthetic construct
RILLHRYET

SEQ ID NO: 18476 - protein, 8 aa, synthetic construct
IRKWFITI

SEQ ID NO: 18477 - protein, 9 aa, synthetic construct
ALRYNILTL

SEQ ID NO: 18478 - protein, 8 aa, synthetic construct
ALRPLVIK

SEQ ID NO: 18479 - protein, 8 aa, synthetic construct
RIPLAVKI

SEQ ID NO: 18480 - protein, 8 aa, synthetic construct
IIGPIRLK

SEQ ID NO: 18481 - protein, 10 aa, synthetic construct
GAKLVRGAYL

SEQ ID NO: 18482 - protein, 10 aa, synthetic construct
YIKIRPGEYE

SEQ ID NO: 18483 - protein, 11 aa, synthetic construct
FAARAAKQLEY

SEQ ID NO: 18484 - protein, 11 aa, synthetic construct
IQKKAMTVGEY

SEQ ID NO: 18485 - protein, 10 aa, synthetic construct
RLSVSDPLQT

SEQ ID NO: 18486 - protein, 9 aa, synthetic construct
QKIQQELQT

SEQ ID NO: 18487 - protein, 10 aa, synthetic construct
SRLDPVSLQT

SEQ ID NO: 18488 - protein, 10 aa, synthetic construct
RDLEQILTQY

SEQ ID NO: 18489 - protein, 12 aa, synthetic construct
LKRPGTSQAGYT

SEQ ID NO: 18490 - protein, 10 aa, synthetic construct
VALGPLRLPV

SEQ ID NO: 18491 - protein, 10 aa, synthetic construct
SLSITPVPSY

SEQ ID NO: 18492 - protein, 9 aa, synthetic construct
LDCFPRLEV

SEQ ID NO: 18493 - protein, 9 aa, synthetic construct
HLEPRVRLL

SEQ ID NO: 18494 - protein, 9 aa, synthetic construct
LLVHMVLLY

SEQ ID NO: 18495 - protein, 8 aa, synthetic construct
LRRTSEEL

SEQ ID NO: 18496 - protein, 9 aa, synthetic construct
RALSPAFEL

SEQ ID NO: 18497 - protein, 9 aa, synthetic construct
LINRPILVL

SEQ ID NO: 18498 - protein, 10 aa, synthetic construct
PPQGLFLLCV

SEQ ID NO: 18499 - protein, 8 aa, synthetic construct
TRLKDVHL

SEQ ID NO: 18500 - protein, 9 aa, synthetic construct
IKVKEITYI

SEQ ID NO: 18501 - protein, 9 aa, synthetic construct
SKIDLHKYL

SEQ ID NO: 18502 - protein, 9 aa, synthetic construct
PRQIQAKYL

SEQ ID NO: 18503 - protein, 9 aa, synthetic construct
RSSLYIRIV

SEQ ID NO: 18504 - protein, 9 aa, synthetic construct
KNLSKERWI

SEQ ID NO: 18505 - protein, 9 aa, synthetic construct
LRLARSVLL

SEQ ID NO: 18506 - protein, 11 aa, synthetic construct
SVLIGLALGHM

SEQ ID NO: 18507 - protein, 9 aa, synthetic construct
GLLKWIIHM

SEQ ID NO: 18508 - protein, 10 aa, synthetic construct
LRDRAEGALL

SEQ ID NO: 18509 - protein, 10 aa, synthetic construct
VWRRVKLPFK

SEQ ID NO: 18510 - protein, 9 aa, synthetic construct
LDRSFLLTY

SEQ ID NO: 18511 - protein, 9 aa, synthetic construct
LYRLDKKPL

SEQ ID NO: 18512 - protein, 10 aa, synthetic construct
RRGGMSIPLK

SEQ ID NO: 18513 - protein, 13 aa, synthetic construct
TVALSDIMGAGVV

SEQ ID NO: 18514 - protein, 10 aa, synthetic construct
TVDIFSLAMS

SEQ ID NO: 18515 - protein, 10 aa, synthetic construct
VSERHMKRSI

SEQ ID NO: 18516 - protein, 13 aa, synthetic construct
VSQVAGPTGARSL

SEQ ID NO: 18517 - protein, 8 aa, synthetic construct
LSENTVII

SEQ ID NO: 18518 - protein, 9 aa, synthetic construct
SVEQSISLL

SEQ ID NO: 18519 - protein, 8 aa, synthetic construct
LSFSVKKM

SEQ ID NO: 18520 - protein, 10 aa, synthetic construct
SFLHLSNRPL

SEQ ID NO: 18521 - protein, 11 aa, synthetic construct
GGAWLIPGERK

SEQ ID NO: 18522 - protein, 10 aa, synthetic construct
ISFPNMETVA

SEQ ID NO: 18523 - protein, 10 aa, synthetic construct
TVFPQVSETT

SEQ ID NO: 18524 - protein, 8 aa, synthetic construct
LSLAAHRS

SEQ ID NO: 18525 - protein, 9 aa, synthetic construct
IPSDLSGTL

SEQ ID NO: 18526 - protein, 9 aa, synthetic construct
SPETMVALL

SEQ ID NO: 18527 - protein, 9 aa, synthetic construct
LSDLMIHPL

SEQ ID NO: 18528 - protein, 9 aa, synthetic construct
IPSFKQGLS

SEQ ID NO: 18529 - protein, 9 aa, synthetic construct
LSGALHVYS

SEQ ID NO: 18530 - protein, 8 aa, synthetic construct
SMVFWLTY

SEQ ID NO: 18531 - protein, 10 aa, synthetic construct
LSYEVLGSVL

SEQ ID NO: 18532 - protein, 8 aa, synthetic construct
YEKELSEY

SEQ ID NO: 18533 - protein, 9 aa, synthetic construct
IFSSEIDQY

SEQ ID NO: 18534 - protein, 9 aa, synthetic construct
LTVDSAHLY

SEQ ID NO: 18535 - protein, 8 aa, synthetic construct
LESHLKEY

SEQ ID NO: 18536 - protein, 11 aa, synthetic construct
LESIHIDPLSY

SEQ ID NO: 18537 - protein, 11 aa, synthetic construct
LFSDDSIPDVP

SEQ ID NO: 18538 - protein, 9 aa, synthetic construct
LSEEVPVVF

SEQ ID NO: 18539 - protein, 9 aa, synthetic construct
LTDPSVVIM

SEQ ID NO: 18540 - protein, 9 aa, synthetic construct
EGNITEIFY

SEQ ID NO: 18541 - protein, 9 aa, synthetic construct
LESNHLTYL

SEQ ID NO: 18542 - protein, 9 aa, synthetic construct
TKDPTNGYY

SEQ ID NO: 18543 - protein, 9 aa, synthetic construct
YISEKEETL

SEQ ID NO: 18544 - protein, 10 aa, synthetic construct
IFPLQPPDKL

SEQ ID NO: 18545 - protein, 11 aa, synthetic construct
PVATPPNAIVF

SEQ ID NO: 18546 - protein, 10 aa, synthetic construct
TSTNAILTSF

SEQ ID NO: 18547 - protein, 10 aa, synthetic construct
LTGSEPLTIL

SEQ ID NO: 18548 - protein, 8 aa, synthetic construct
LTSRDSSV

SEQ ID NO: 18549 - protein, 8 aa, synthetic construct
KEPSEITL

SEQ ID NO: 18550 - protein, 9 aa, synthetic construct
TLPSTLQQH

SEQ ID NO: 18551 - protein, 11 aa, synthetic construct
LTNYIMITSSS

SEQ ID NO: 18552 - protein, 9 aa, synthetic construct
ISSLIEYTL

SEQ ID NO: 18553 - protein, 10 aa, synthetic construct
TLTDVNDNPP

SEQ ID NO: 18554 - protein, 9 aa, synthetic construct
KLLGELHTL

SEQ ID NO: 18555 - protein, 9 aa, synthetic construct
TLVGKDPGL

SEQ ID NO: 18556 - protein, 10 aa, synthetic construct
FEQALEFHKS

SEQ ID NO: 18557 - protein, 9 aa, synthetic construct
VLILSQRSL

SEQ ID NO: 18558 - protein, 9 aa, synthetic construct
LVLLATLSK

SEQ ID NO: 18559 - protein, 9 aa, synthetic construct
VLAVTGMIE

SEQ ID NO: 18560 - protein, 9 aa, synthetic construct
LFTGFIKVL

SEQ ID NO: 18561 - protein, 9 aa, synthetic construct
LVDEHLLWL

SEQ ID NO: 18562 - protein, 9 aa, synthetic construct
IMKFINDQY

SEQ ID NO: 18563 - protein, 11 aa, synthetic construct
LPAGTAAPLMY

SEQ ID NO: 18564 - protein, 9 aa, synthetic construct
IEVTRDVIV

SEQ ID NO: 18565 - protein, 8 aa, synthetic construct
VDLPSVNL

SEQ ID NO: 18566 - protein, 8 aa, synthetic construct
LVPVDVTN

SEQ ID NO: 18567 - protein, 9 aa, synthetic construct
VLDPVGSAV

SEQ ID NO: 18568 - protein, 10 aa, synthetic construct
LVDLRPKGLD

SEQ ID NO: 18569 - protein, 10 aa, synthetic construct
LVDIVDPKQV

SEQ ID NO: 18570 - protein, 10 aa, synthetic construct
LVDVVDPKQL

SEQ ID NO: 18571 - protein, 11 aa, synthetic construct
IVDGPQVLSVV

SEQ ID NO: 18572 - protein, 10 aa, synthetic construct
LVDNSVPLLR

SEQ ID NO: 18573 - protein, 8 aa, synthetic construct
IKDDSVLY

SEQ ID NO: 18574 - protein, 9 aa, synthetic construct
VPIDLDSLL

SEQ ID NO: 18575 - protein, 8 aa, synthetic construct
VIFLNRKI

SEQ ID NO: 18576 - protein, 11 aa, synthetic construct
IVFGGSLGSRQ

SEQ ID NO: 18577 - protein, 8 aa, synthetic construct
LVGVPLEM

SEQ ID NO: 18578 - protein, 12 aa, synthetic construct
LVESGCPASIVN

SEQ ID NO: 18579 - protein, 9 aa, synthetic construct
ILPPGLRKK

SEQ ID NO: 18580 - protein, 9 aa, synthetic construct
VLLVAGRSS

SEQ ID NO: 18581 - protein, 9 aa, synthetic construct
IVEREPWDG

SEQ ID NO: 18582 - protein, 9 aa, synthetic construct
LVNTMFTQF

SEQ ID NO: 18583 - protein, 12 aa, synthetic construct
LVKVHGGTTADM

SEQ ID NO: 18584 - protein, 8 aa, synthetic construct
IPVEHQVL

SEQ ID NO: 18585 - protein, 8 aa, synthetic construct
VIPLNGTI

SEQ ID NO: 18586 - protein, 9 aa, synthetic construct
ASADKQLVL

SEQ ID NO: 18587 - protein, 7 aa, synthetic construct
LVPVEQL

SEQ ID NO: 18588 - protein, 9 aa, synthetic construct
VLVKTLRAI

SEQ ID NO: 18589 - protein, 10 aa, synthetic construct
ALGISAVAVY

SEQ ID NO: 18590 - protein, 10 aa, synthetic construct
LSLTVLGGCF

SEQ ID NO: 18591 - protein, 9 aa, synthetic construct
VLISVTILY

SEQ ID NO: 18592 - protein, 9 aa, synthetic construct
LSSVLLLLY

SEQ ID NO: 18593 - protein, 9 aa, synthetic construct
LVFMFPVGL

SEQ ID NO: 18594 - protein, 11 aa, synthetic construct
IVEDSIYIAYG

SEQ ID NO: 18595 - protein, 11 aa, synthetic construct
LVVGNHLSGEH

SEQ ID NO: 18596 - protein, 8 aa, synthetic construct
IVPLQYVF

SEQ ID NO: 18597 - protein, 9 aa, synthetic construct
ESPYLVPVI

SEQ ID NO: 18598 - protein, 11 aa, synthetic construct
LMPGVVSAAGT

SEQ ID NO: 18599 - protein, 10 aa, synthetic construct
NGKELVKPLA

SEQ ID NO: 18600 - protein, 10 aa, synthetic construct
LSQSFLSAGF

SEQ ID NO: 18601 - protein, 10 aa, synthetic construct
IYDNVNSCLL

SEQ ID NO: 18602 - protein, 9 aa, synthetic construct
DEYLALPSH

SEQ ID NO: 18603 - protein, 8 aa, synthetic construct
YEVFADLF

SEQ ID NO: 18604 - protein, 9 aa, synthetic construct
YDLFVSMIM

SEQ ID NO: 18605 - protein, 9 aa, synthetic construct
YDLFLDFMA

SEQ ID NO: 18606 - protein, 8 aa, synthetic construct
IYLFQDKI

SEQ ID NO: 18607 - protein, 9 aa, synthetic construct
LYQTFVVQL

SEQ ID NO: 18608 - protein, 9 aa, synthetic construct
LQKSLMVYI

SEQ ID NO: 18609 - protein, 10 aa, synthetic construct
LSSLSTAFIF

SEQ ID NO: 18610 - protein, 9 aa, synthetic construct
TQLTYEGLI

SEQ ID NO: 18611 - protein, 9 aa, synthetic construct
YDLLDTAMI

SEQ ID NO: 18612 - protein, 9 aa, synthetic construct
YIDLQKNHI

SEQ ID NO: 18613 - protein, 9 aa, synthetic construct
SPTNYLQGL

SEQ ID NO: 18614 - protein, 10 aa, synthetic construct
YAAAEGQIEL

SEQ ID NO: 18615 - protein, 9 aa, synthetic construct
LQTMELALF

SEQ ID NO: 18616 - protein, 11 aa, synthetic construct
LYDLVTCKQTK

SEQ ID NO: 18617 - protein, 10 aa, synthetic construct
LYTEAPPVPF

SEQ ID NO: 18618 - protein, 8 aa, synthetic construct
LYPNVENM

SEQ ID NO: 18619 - protein, 9 aa, synthetic construct
LYYQINATS

SEQ ID NO: 18620 - protein, 10 aa, synthetic construct
VLDVNEAPIF

SEQ ID NO: 18621 - protein, 9 aa, synthetic construct
FLFIIENMF

SEQ ID NO: 18622 - protein, 11 aa, synthetic construct
LGEHNIDVLEG

SEQ ID NO: 18623 - protein, 10 aa, synthetic construct
YLYGGLEFGA

SEQ ID NO: 18624 - protein, 8 aa, synthetic construct
LYLAQPHF

SEQ ID NO: 18625 - protein, 9 aa, synthetic construct
YLLDFEDRL

SEQ ID NO: 18626 - protein, 9 aa, synthetic construct
YLLRGRKTF

SEQ ID NO: 18627 - protein, 9 aa, synthetic construct
LYLSPFYRR

SEQ ID NO: 18628 - protein, 12 aa, synthetic construct
LYIPAAAVPGGS

SEQ ID NO: 18629 - protein, 9 aa, synthetic construct
LYIVSQFFV

SEQ ID NO: 18630 - protein, 10 aa, synthetic construct
YSVAIIILTV

SEQ ID NO: 18631 - protein, 9 aa, synthetic construct
LDGLYLLTL

SEQ ID NO: 18632 - protein, 9 aa, synthetic construct
YIIIIAFFM

SEQ ID NO: 18633 - protein, 11 aa, synthetic construct
YLIYPNGSHGL

SEQ ID NO: 18634 - protein, 10 aa, synthetic construct
ALKKALFVKL

SEQ ID NO: 18635 - protein, 9 aa, synthetic construct
LYLSMDLSL

SEQ ID NO: 18636 - protein, 9 aa, synthetic construct
AGSLFLIYE

SEQ ID NO: 18637 - protein, 10 aa, synthetic construct
YVLSDAAMSL

SEQ ID NO: 18638 - protein, 10 aa, synthetic construct
LYAVELEKEL

SEQ ID NO: 18639 - protein, 13 aa, synthetic construct
IYGITALLGGSAA

SEQ ID NO: 18640 - protein, 10 aa, synthetic construct
LIDGREAVTF

SEQ ID NO: 18641 - protein, 12 aa, synthetic construct
LATRYLLMPPAL

SEQ ID NO: 18642 - protein, 11 aa, synthetic construct
IYKTLKTHLIE

SEQ ID NO: 18643 - protein, 11 aa, synthetic construct
IIMHKIRPHIT

SEQ ID NO: 18644 - protein, 11 aa, synthetic construct
ILVSGTGGWSA

SEQ ID NO: 18645 - protein, 10 aa, synthetic construct
LYYIAGSLST

SEQ ID NO: 18646 - protein, 9 aa, synthetic construct
KEAADMILV

SEQ ID NO: 18647 - protein, 9 aa, synthetic construct
SMIDDLLGV

SEQ ID NO: 18648 - protein, 8 aa, synthetic construct
VADFEEIR

SEQ ID NO: 18649 - protein, 9 aa, synthetic construct
LTLMEEVLL

SEQ ID NO: 18650 - protein, 9 aa, synthetic construct
GLGMLPVAP

SEQ ID NO: 18651 - protein, 10 aa, synthetic construct
PAISALGGQG

SEQ ID NO: 18652 - protein, 9 aa, synthetic construct
LMLVEDVRV

SEQ ID NO: 18653 - protein, 8 aa, synthetic construct
MILPIVGI

SEQ ID NO: 18654 - protein, 8 aa, synthetic construct
IQRTMLEL

SEQ ID NO: 18655 - protein, 10 aa, synthetic construct
QPQSLLVETV

SEQ ID NO: 18656 - protein, 10 aa, synthetic construct
IAADMSNIIE

SEQ ID NO: 18657 - protein, 12 aa, synthetic construct
QALMDGLSLESL

SEQ ID NO: 18658 - protein, 10 aa, synthetic construct
IETANISYTN

SEQ ID NO: 18659 - protein, 7 aa, synthetic construct
KAEDQKQ

SEQ ID NO: 18660 - protein, 8 aa, synthetic construct
KAEQADGK

SEQ ID NO: 18661 - protein, 9 aa, synthetic construct
ENKFKSEAK

SEQ ID NO: 18662 - protein, 9 aa, synthetic construct
FGEKYKCKA

SEQ ID NO: 18663 - protein, 10 aa, synthetic construct
NLARAMALLF

SEQ ID NO: 18664 - protein, 9 aa, synthetic construct
AVYRLLVVL

SEQ ID NO: 18665 - protein, 9 aa, synthetic construct
AMKKKLVVL

SEQ ID NO: 18666 - protein, 10 aa, synthetic construct
ALSGILIQFE

SEQ ID NO: 18667 - protein, 9 aa, synthetic construct
PQSLPLSSI

SEQ ID NO: 18668 - protein, 9 aa, synthetic construct
ISVPAKTSL

SEQ ID NO: 18669 - protein, 9 aa, synthetic construct
KALNRFEKL

SEQ ID NO: 18670 - protein, 9 aa, synthetic construct
RRIDITAKL

SEQ ID NO: 18671 - protein, 10 aa, synthetic construct
KAGPILFAAL

SEQ ID NO: 18672 - protein, 9 aa, synthetic construct
KAEGKVRLL

SEQ ID NO: 18673 - protein, 9 aa, synthetic construct
LLGSKLFYC

SEQ ID NO: 18674 - protein, 9 aa, synthetic construct
NSVSLFVFC

SEQ ID NO: 18675 - protein, 9 aa, synthetic construct
WLSGFGNSF

SEQ ID NO: 18676 - protein, 9 aa, synthetic construct
ESPHVNNSF

SEQ ID NO: 18677 - protein, 11 aa, synthetic construct
NSTADTSKVSL

SEQ ID NO: 18678 - protein, 9 aa, synthetic construct
NKLDEFIQW

SEQ ID NO: 18679 - protein, 11 aa, synthetic construct
ATAVPTTPSMA

SEQ ID NO: 18680 - protein, 10 aa, synthetic construct
GFEEVPFQAL

SEQ ID NO: 18681 - protein, 14 aa, synthetic construct
RTGGGHGAPDPGPA

SEQ ID NO: 18682 - protein, 9 aa, synthetic construct
KDSAHILQI

SEQ ID NO: 18683 - protein, 10 aa, synthetic construct
LDEGTVQWIV

SEQ ID NO: 18684 - protein, 12 aa, synthetic construct
PEITAGGSVPAL

SEQ ID NO: 18685 - protein, 10 aa, synthetic construct
KISMCYSQTL

SEQ ID NO: 18686 - protein, 8 aa, synthetic construct
KMSRWSLV

SEQ ID NO: 18687 - protein, 13 aa, synthetic construct
VTPAAAVPEAPSV

SEQ ID NO: 18688 - protein, 9 aa, synthetic construct
EQLYFLQSP

SEQ ID NO: 18689 - protein, 9 aa, synthetic construct
LQYKGELTV

SEQ ID NO: 18690 - protein, 10 aa, synthetic construct
FSIVQFSFKA

SEQ ID NO: 18691 - protein, 9 aa, synthetic construct
KEVLQEYIA

SEQ ID NO: 18692 - protein, 9 aa, synthetic construct
IEEFQKLQE

SEQ ID NO: 18693 - protein, 10 aa, synthetic construct
LSHPSYLKVF

SEQ ID NO: 18694 - protein, 9 aa, synthetic construct
ICSSTKLLK

SEQ ID NO: 18695 - protein, 11 aa, synthetic construct
MGSLRLSGLDV

SEQ ID NO: 18696 - protein, 9 aa, synthetic construct
EKEKHKDEV

SEQ ID NO: 18697 - protein, 10 aa, synthetic construct
SLEDFFPQGA

SEQ ID NO: 18698 - protein, 10 aa, synthetic construct
VAAYKGQTEN

SEQ ID NO: 18699 - protein, 10 aa, synthetic construct
LSFGIGPAGV

SEQ ID NO: 18700 - protein, 9 aa, synthetic construct
LMEKKFQGV

SEQ ID NO: 18701 - protein, 13 aa, synthetic construct
SPGPAGQQGAIGS

SEQ ID NO: 18702 - protein, 11 aa, synthetic construct
VSSFAVGGMTA

SEQ ID NO: 18703 - protein, 10 aa, synthetic construct
ASVFSPSFGL

SEQ ID NO: 18704 - protein, 10 aa, synthetic construct
AVSFSTPFGL

SEQ ID NO: 18705 - protein, 11 aa, synthetic construct
SSATYQPSFAA

SEQ ID NO: 18706 - protein, 10 aa, synthetic construct
EKMSLEQAKA

SEQ ID NO: 18707 - protein, 11 aa, synthetic construct
TSANNMRHLTA

SEQ ID NO: 18708 - protein, 11 aa, synthetic construct
GLSHVDYALIA

SEQ ID NO: 18709 - protein, 10 aa, synthetic construct
HSFLSVFETV

SEQ ID NO: 18710 - protein, 11 aa, synthetic construct
VIDFHSGTSLF

SEQ ID NO: 18711 - protein, 11 aa, synthetic construct
LPPDAPELVQA

SEQ ID NO: 18712 - protein, 11 aa, synthetic construct
ALSVSVYPAHT

SEQ ID NO: 18713 - protein, 9 aa, synthetic construct
LERRLYGDP

SEQ ID NO: 18714 - protein, 10 aa, synthetic construct
SGLLELKAVP

SEQ ID NO: 18715 - protein, 12 aa, synthetic construct
NHLLGDPMANVA

SEQ ID NO: 18716 - protein, 9 aa, synthetic construct
LELSNLTIQ

SEQ ID NO: 18717 - protein, 9 aa, synthetic construct
SVALNITVQ

SEQ ID NO: 18718 - protein, 9 aa, synthetic construct
EKILDKLEL

SEQ ID NO: 18719 - protein, 9 aa, synthetic construct
KELERRREA

SEQ ID NO: 18720 - protein, 10 aa, synthetic construct
TQLQHNEIIP

SEQ ID NO: 18721 - protein, 9 aa, synthetic construct
ALLQNLKEK

SEQ ID NO: 18722 - protein, 11 aa, synthetic construct
SVLACSMLRIL

SEQ ID NO: 18723 - protein, 9 aa, synthetic construct
YSLIQNPLT

SEQ ID NO: 18724 - protein, 11 aa, synthetic construct
KGKSLLGAFIP

SEQ ID NO: 18725 - protein, 9 aa, synthetic construct
KTFDKILVA

SEQ ID NO: 18726 - protein, 9 aa, synthetic construct
IAKYKELVA

SEQ ID NO: 18727 - protein, 10 aa, synthetic construct
KKYELENEEI

SEQ ID NO: 18728 - protein, 10 aa, synthetic construct
EKLRVAALVA

SEQ ID NO: 18729 - protein, 10 aa, synthetic construct
KELITITKEA

SEQ ID NO: 18730 - protein, 10 aa, synthetic construct
ILNKETVAVA

SEQ ID NO: 18731 - protein, 9 aa, synthetic construct
KELLQKELA

SEQ ID NO: 18732 - protein, 9 aa, synthetic construct
NLATVKSKE

SEQ ID NO: 18733 - protein, 10 aa, synthetic construct
KTYNNLDVSV

SEQ ID NO: 18734 - protein, 10 aa, synthetic construct
ENGYLMEAAP

SEQ ID NO: 18735 - protein, 9 aa, synthetic construct
FPTWSRDVA

SEQ ID NO: 18736 - protein, 10 aa, synthetic construct
KADAVARLVA

SEQ ID NO: 18737 - protein, 11 aa, synthetic construct
VASAKSAPEIP

SEQ ID NO: 18738 - protein, 11 aa, synthetic construct
SARSSQGIMVA

SEQ ID NO: 18739 - protein, 9 aa, synthetic construct
MGDRLYIGL

SEQ ID NO: 18740 - protein, 9 aa, synthetic construct
LGSIPSIFK

SEQ ID NO: 18741 - protein, 9 aa, synthetic construct
KESSVTEFI

SEQ ID NO: 18742 - protein, 9 aa, synthetic construct
SETLKHLVL

SEQ ID NO: 18743 - protein, 11 aa, synthetic construct
LNTASTKELEA

SEQ ID NO: 18744 - protein, 9 aa, synthetic construct
IKDEFQTLN

SEQ ID NO: 18745 - protein, 12 aa, synthetic construct
AAASLSYPTQGL

SEQ ID NO: 18746 - protein, 9 aa, synthetic construct
AEVDKNIEL

SEQ ID NO: 18747 - protein, 10 aa, synthetic construct
EFLAATQDIA

SEQ ID NO: 18748 - protein, 9 aa, synthetic construct
ATYFFMKEK

SEQ ID NO: 18749 - protein, 8 aa, synthetic construct
KEFFEKLQ

SEQ ID NO: 18750 - protein, 10 aa, synthetic construct
TMHNNRSLTI

SEQ ID NO: 18751 - protein, 11 aa, synthetic construct
KEHLLSKSGGD

SEQ ID NO: 18752 - protein, 10 aa, synthetic construct
ENVFSSLLAI

SEQ ID NO: 18753 - protein, 10 aa, synthetic construct
KEYEKYARMY

SEQ ID NO: 18754 - protein, 10 aa, synthetic construct
AEELYIGVTV

SEQ ID NO: 18755 - protein, 10 aa, synthetic construct
EFYKLYLVGG

SEQ ID NO: 18756 - protein, 12 aa, synthetic construct
LATIAPAPAPAA

SEQ ID NO: 18757 - protein, 11 aa, synthetic construct
MEGKYSVAEVF

SEQ ID NO: 18758 - protein, 10 aa, synthetic construct
FSLFQDTMAV

SEQ ID NO: 18759 - protein, 9 aa, synthetic construct
KEIFALKDL

SEQ ID NO: 18760 - protein, 11 aa, synthetic construct
PAAPECKVLTA

SEQ ID NO: 18761 - protein, 10 aa, synthetic construct
HQLEEDIVSV

SEQ ID NO: 18762 - protein, 10 aa, synthetic construct
KPTQQKDDKE

SEQ ID NO: 18763 - protein, 9 aa, synthetic construct
STNSTKSVL

SEQ ID NO: 18764 - protein, 9 aa, synthetic construct
KDFVCGLYF

SEQ ID NO: 18765 - protein, 10 aa, synthetic construct
WVQQTATLAI

SEQ ID NO: 18766 - protein, 10 aa, synthetic construct
KLFGVSLQEL

SEQ ID NO: 18767 - protein, 12 aa, synthetic construct
VSPGTGKHLQVW

SEQ ID NO: 18768 - protein, 9 aa, synthetic construct
ISVDYKSFK

SEQ ID NO: 18769 - protein, 9 aa, synthetic construct
KLPFRAFRT

SEQ ID NO: 18770 - protein, 11 aa, synthetic construct
ILVFDLGGGTF

SEQ ID NO: 18771 - protein, 11 aa, synthetic construct
SNRLGIDNFEF

SEQ ID NO: 18772 - protein, 11 aa, synthetic construct
KEVQKGGPADL

SEQ ID NO: 18773 - protein, 10 aa, synthetic construct
LLMVCKTITF

SEQ ID NO: 18774 - protein, 10 aa, synthetic construct
KGVRMKLTVI

SEQ ID NO: 18775 - protein, 8 aa, synthetic construct
LKIMVPRT

SEQ ID NO: 18776 - protein, 11 aa, synthetic construct
TAGLFLLTWGG

SEQ ID NO: 18777 - protein, 9 aa, synthetic construct
EYVEHTVKE

SEQ ID NO: 18778 - protein, 8 aa, synthetic construct
LRIIMMKK

SEQ ID NO: 18779 - protein, 9 aa, synthetic construct
KITFRTPLY

SEQ ID NO: 18780 - protein, 9 aa, synthetic construct
LKALMLTLK

SEQ ID NO: 18781 - protein, 10 aa, synthetic construct
QKAQEHAFNV

SEQ ID NO: 18782 - protein, 11 aa, synthetic construct
AVGPSSTQLYM

SEQ ID NO: 18783 - protein, 11 aa, synthetic construct
ARRHGPALVGQ

SEQ ID NO: 18784 - protein, 12 aa, synthetic construct
LSSIKTATGVQG

SEQ ID NO: 18785 - protein, 12 aa, synthetic construct
PVAGVMAYLFTI

SEQ ID NO: 18786 - protein, 9 aa, synthetic construct
KIDLGFGTK

SEQ ID NO: 18787 - protein, 8 aa, synthetic construct
KIIGIPSP

SEQ ID NO: 18788 - protein, 8 aa, synthetic construct
FYDRRFLK

SEQ ID NO: 18789 - protein, 9 aa, synthetic construct
FKESLKVVF

SEQ ID NO: 18790 - protein, 9 aa, synthetic construct
ELTDLKLQL

SEQ ID NO: 18791 - protein, 9 aa, synthetic construct
VELKEVVVG

SEQ ID NO: 18792 - protein, 9 aa, synthetic construct
KLLGIETPL

SEQ ID NO: 18793 - protein, 9 aa, synthetic construct
LLRSQLILK

SEQ ID NO: 18794 - protein, 10 aa, synthetic construct
TVKRCLLDTF

SEQ ID NO: 18795 - protein, 10 aa, synthetic construct
LLLAQVTPVM

SEQ ID NO: 18796 - protein, 9 aa, synthetic construct
VIVKINNQL

SEQ ID NO: 18797 - protein, 9 aa, synthetic construct
FWLVLVVVF

SEQ ID NO: 18798 - protein, 11 aa, synthetic construct
TVLKIPSAAGK

SEQ ID NO: 18799 - protein, 10 aa, synthetic construct
LEQLLDGKKL

SEQ ID NO: 18800 - protein, 9 aa, synthetic construct
KQPRPWPQL

SEQ ID NO: 18801 - protein, 9 aa, synthetic construct
VEKIYGQEV

SEQ ID NO: 18802 - protein, 9 aa, synthetic construct
SLIHHFKLY

SEQ ID NO: 18803 - protein, 11 aa, synthetic construct
TKPVESDLENL

SEQ ID NO: 18804 - protein, 9 aa, synthetic construct
KICERLHLS

SEQ ID NO: 18805 - protein, 9 aa, synthetic construct
FQEIAQELY

SEQ ID NO: 18806 - protein, 9 aa, synthetic construct
LKLSEDCLY

SEQ ID NO: 18807 - protein, 13 aa, synthetic construct
GAGERGGKEVLGG

SEQ ID NO: 18808 - protein, 10 aa, synthetic construct
KDREGKPKSF

SEQ ID NO: 18809 - protein, 9 aa, synthetic construct
KVELFLKEY

SEQ ID NO: 18810 - protein, 10 aa, synthetic construct
GSLSFLQQFL

SEQ ID NO: 18811 - protein, 10 aa, synthetic construct
LKFEYFGSPQ

SEQ ID NO: 18812 - protein, 10 aa, synthetic construct
KLFYCSNGNL

SEQ ID NO: 18813 - protein, 9 aa, synthetic construct
IHPVDKLTI

SEQ ID NO: 18814 - protein, 8 aa, synthetic construct
MKFLKITI

SEQ ID NO: 18815 - protein, 9 aa, synthetic construct
KLLFGGLSF

SEQ ID NO: 18816 - protein, 11 aa, synthetic construct
RTLISDIEAVK

SEQ ID NO: 18817 - protein, 10 aa, synthetic construct
LKFMLRMGIS

SEQ ID NO: 18818 - protein, 9 aa, synthetic construct
KEAVLTTVI

SEQ ID NO: 18819 - protein, 9 aa, synthetic construct
VEKHLNAQL

SEQ ID NO: 18820 - protein, 10 aa, synthetic construct
LMKTIYEQEL

SEQ ID NO: 18821 - protein, 10 aa, synthetic construct
LQNLHICQEI

SEQ ID NO: 18822 - protein, 9 aa, synthetic construct
KLHKGTPNV

SEQ ID NO: 18823 - protein, 9 aa, synthetic construct
LGHVELLNV

SEQ ID NO: 18824 - protein, 9 aa, synthetic construct
KLLDGFFIR

SEQ ID NO: 18825 - protein, 10 aa, synthetic construct
KLLSSQAQSL

SEQ ID NO: 18826 - protein, 11 aa, synthetic construct
KIIADMLFNLL

SEQ ID NO: 18827 - protein, 10 aa, synthetic construct
KLLGVGTKYL

SEQ ID NO: 18828 - protein, 11 aa, synthetic construct
KLLTMDPIKRI

SEQ ID NO: 18829 - protein, 9 aa, synthetic construct
KYEVLALLY

SEQ ID NO: 18830 - protein, 9 aa, synthetic construct
LKLLDEVTY

SEQ ID NO: 18831 - protein, 11 aa, synthetic construct
LKLLDFGSLSN

SEQ ID NO: 18832 - protein, 9 aa, synthetic construct
KILDRYLSL

SEQ ID NO: 18833 - protein, 9 aa, synthetic construct
LLKDLLNRV

SEQ ID NO: 18834 - protein, 10 aa, synthetic construct
LKIINGGLRV

SEQ ID NO: 18835 - protein, 10 aa, synthetic construct
KILDITEGLI

SEQ ID NO: 18836 - protein, 10 aa, synthetic construct
PDLDKTKIFL

SEQ ID NO: 18837 - protein, 11 aa, synthetic construct
VALETVQGIFI

SEQ ID NO: 18838 - protein, 9 aa, synthetic construct
KISELLMLL

SEQ ID NO: 18839 - protein, 9 aa, synthetic construct
LLKELLPVI

SEQ ID NO: 18840 - protein, 10 aa, synthetic construct
LIVTGPLVLI

SEQ ID NO: 18841 - protein, 11 aa, synthetic construct
KLLELLPGKVL

SEQ ID NO: 18842 - protein, 10 aa, synthetic construct
GLLKEAALVL

SEQ ID NO: 18843 - protein, 10 aa, synthetic construct
VHIQPVITDL

SEQ ID NO: 18844 - protein, 11 aa, synthetic construct
LILEYAPLGTV

SEQ ID NO: 18845 - protein, 9 aa, synthetic construct
KILVIPSKV

SEQ ID NO: 18846 - protein, 8 aa, synthetic construct
KLLVDSLP

SEQ ID NO: 18847 - protein, 8 aa, synthetic construct
KLLDFIKH

SEQ ID NO: 18848 - protein, 9 aa, synthetic construct
AKICHQIEY

SEQ ID NO: 18849 - protein, 8 aa, synthetic construct
LRWCLLLY

SEQ ID NO: 18850 - protein, 9 aa, synthetic construct
MLIPVKMII

SEQ ID NO: 18851 - protein, 10 aa, synthetic construct
LNKATAQNKD

SEQ ID NO: 18852 - protein, 11 aa, synthetic construct
AAGGLNPKFEV

SEQ ID NO: 18853 - protein, 10 aa, synthetic construct
NGLSASKSQI

SEQ ID NO: 18854 - protein, 10 aa, synthetic construct
LDREENPQLK

SEQ ID NO: 18855 - protein, 10 aa, synthetic construct
KLDLSPWASV

SEQ ID NO: 18856 - protein, 11 aa, synthetic construct
KLPELPGINYS

SEQ ID NO: 18857 - protein, 9 aa, synthetic construct
ENGVSSRID

SEQ ID NO: 18858 - protein, 8 aa, synthetic construct
KIQPKDSL

SEQ ID NO: 18859 - protein, 9 aa, synthetic construct
KLPGSPGLS

SEQ ID NO: 18860 - protein, 11 aa, synthetic construct
LKCTVGPAMNK

SEQ ID NO: 18861 - protein, 12 aa, synthetic construct
IASVAGLFAGTL

SEQ ID NO: 18862 - protein, 9 aa, synthetic construct
QSKVIETQL

SEQ ID NO: 18863 - protein, 9 aa, synthetic construct
VTKLQQQLK

SEQ ID NO: 18864 - protein, 8 aa, synthetic construct
KGKKSKKI

SEQ ID NO: 18865 - protein, 11 aa, synthetic construct
LAAAEREKIIN

SEQ ID NO: 18866 - protein, 9 aa, synthetic construct
QKFIRIYKL

SEQ ID NO: 18867 - protein, 9 aa, synthetic construct
QSLRSQLQL

SEQ ID NO: 18868 - protein, 9 aa, synthetic construct
KVMKTLLEV

SEQ ID NO: 18869 - protein, 10 aa, synthetic construct
GGLEPNRQYL

SEQ ID NO: 18870 - protein, 8 aa, synthetic construct
LKYEIKKL

SEQ ID NO: 18871 - protein, 10 aa, synthetic construct
LNKKVSTGVK

SEQ ID NO: 18872 - protein, 9 aa, synthetic construct
IYKGKPVRL

SEQ ID NO: 18873 - protein, 9 aa, synthetic construct
KLTTLSRRV

SEQ ID NO: 18874 - protein, 9 aa, synthetic construct
KLMLAVRKL

SEQ ID NO: 18875 - protein, 9 aa, synthetic construct
KLYPLPSAR

SEQ ID NO: 18876 - protein, 9 aa, synthetic construct
IKYTVAVRE

SEQ ID NO: 18877 - protein, 9 aa, synthetic construct
LLMNSHLEY

SEQ ID NO: 18878 - protein, 9 aa, synthetic construct
IHVEMKFSV

SEQ ID NO: 18879 - protein, 9 aa, synthetic construct
LEKIMLEIE

SEQ ID NO: 18880 - protein, 9 aa, synthetic construct
LKPEYLEEL

SEQ ID NO: 18881 - protein, 10 aa, synthetic construct
MILSGNILYL

SEQ ID NO: 18882 - protein, 10 aa, synthetic construct
LLGTNAKMLI

SEQ ID NO: 18883 - protein, 10 aa, synthetic construct
QAHIEGNMKL

SEQ ID NO: 18884 - protein, 8 aa, synthetic construct
VKEKLCYV

SEQ ID NO: 18885 - protein, 10 aa, synthetic construct
MKMSVILGII

SEQ ID NO: 18886 - protein, 9 aa, synthetic construct
SLMITCVTI

SEQ ID NO: 18887 - protein, 9 aa, synthetic construct
LQTAAFSNL

SEQ ID NO: 18888 - protein, 10 aa, synthetic construct
APPPINKLAL

SEQ ID NO: 18889 - protein, 9 aa, synthetic construct
AAMKLMTSL

SEQ ID NO: 18890 - protein, 10 aa, synthetic construct
FASLPGFLFS

SEQ ID NO: 18891 - protein, 8 aa, synthetic construct
MKIKFKIK

SEQ ID NO: 18892 - protein, 12 aa, synthetic construct
KSIHVKLDVGKL

SEQ ID NO: 18893 - protein, 12 aa, synthetic construct
TLAVAISPSAWY

SEQ ID NO: 18894 - protein, 8 aa, synthetic construct
PKPQIQAF

SEQ ID NO: 18895 - protein, 10 aa, synthetic construct
KHIGPGILSM

SEQ ID NO: 18896 - protein, 10 aa, synthetic construct
MAFRDVAVAF

SEQ ID NO: 18897 - protein, 10 aa, synthetic construct
AGFLHQHGLF

SEQ ID NO: 18898 - protein, 10 aa, synthetic construct
PKIEQLANPK

SEQ ID NO: 18899 - protein, 9 aa, synthetic construct
KLPRLWDPL

SEQ ID NO: 18900 - protein, 11 aa, synthetic construct
KPVVFLQHGLL

SEQ ID NO: 18901 - protein, 10 aa, synthetic construct
GDFLVAVNEY

SEQ ID NO: 18902 - protein, 9 aa, synthetic construct
IKPIPANQE

SEQ ID NO: 18903 - protein, 10 aa, synthetic construct
KKPDLSPLKL

SEQ ID NO: 18904 - protein, 8 aa, synthetic construct
FIVFRETF

SEQ ID NO: 18905 - protein, 10 aa, synthetic construct
IDVEKPLNSF

SEQ ID NO: 18906 - protein, 10 aa, synthetic construct
ISVIKNPTVF

SEQ ID NO: 18907 - protein, 9 aa, synthetic construct
KLPEIKLPK

SEQ ID NO: 18908 - protein, 7 aa, synthetic construct
RHRSKAF

SEQ ID NO: 18909 - protein, 10 aa, synthetic construct
TSILPEKGVA

SEQ ID NO: 18910 - protein, 10 aa, synthetic construct
LVQSISPTLG

SEQ ID NO: 18911 - protein, 11 aa, synthetic construct
SQNPLAKLLLD

SEQ ID NO: 18912 - protein, 11 aa, synthetic construct
AMKDLAQQINL

SEQ ID NO: 18913 - protein, 10 aa, synthetic construct
LVQPGKLSFG

SEQ ID NO: 18914 - protein, 10 aa, synthetic construct
PPGAATAVVI

SEQ ID NO: 18915 - protein, 9 aa, synthetic construct
KQKTPLIIL

SEQ ID NO: 18916 - protein, 10 aa, synthetic construct
FIHPSSVLFK

SEQ ID NO: 18917 - protein, 11 aa, synthetic construct
MKDIVGLIALK

SEQ ID NO: 18918 - protein, 9 aa, synthetic construct
KLVHYEVEI

SEQ ID NO: 18919 - protein, 9 aa, synthetic construct
LEHPRHVEI

SEQ ID NO: 18920 - protein, 9 aa, synthetic construct
KNNPKFLAI

SEQ ID NO: 18921 - protein, 9 aa, synthetic construct
NRAIVMGLK

SEQ ID NO: 18922 - protein, 10 aa, synthetic construct
KPVVLPAIMP

SEQ ID NO: 18923 - protein, 10 aa, synthetic construct
PKRPLGKHSK

SEQ ID NO: 18924 - protein, 9 aa, synthetic construct
KPALDRKKI

SEQ ID NO: 18925 - protein, 11 aa, synthetic construct
TGVLRGVAGGF

SEQ ID NO: 18926 - protein, 9 aa, synthetic construct
KQPEVKTGF

SEQ ID NO: 18927 - protein, 8 aa, synthetic construct
IFLKYVIE

SEQ ID NO: 18928 - protein, 9 aa, synthetic construct
APNLLRVEI

SEQ ID NO: 18929 - protein, 10 aa, synthetic construct
KVRESPFSYL

SEQ ID NO: 18930 - protein, 10 aa, synthetic construct
KITELNTMYL

SEQ ID NO: 18931 - protein, 9 aa, synthetic construct
VPKPRVTEV

SEQ ID NO: 18932 - protein, 11 aa, synthetic construct
SAAEGLISYAI

SEQ ID NO: 18933 - protein, 9 aa, synthetic construct
PLSKLMTIS

SEQ ID NO: 18934 - protein, 9 aa, synthetic construct
IWSLGITSI

SEQ ID NO: 18935 - protein, 9 aa, synthetic construct
KPGEGKLIF

SEQ ID NO: 18936 - protein, 9 aa, synthetic construct
LTQTAAREL

SEQ ID NO: 18937 - protein, 11 aa, synthetic construct
GWLITPSKETF

SEQ ID NO: 18938 - protein, 11 aa, synthetic construct
EANPETKGAVY

SEQ ID NO: 18939 - protein, 10 aa, synthetic construct
LGQAFTIMLV

SEQ ID NO: 18940 - protein, 8 aa, synthetic construct
CSKLTICL

SEQ ID NO: 18941 - protein, 9 aa, synthetic construct
AEKFGGLCL

SEQ ID NO: 18942 - protein, 9 aa, synthetic construct
SQFLPLTGL

SEQ ID NO: 18943 - protein, 11 aa, synthetic construct
DKVTKNSSGII

SEQ ID NO: 18944 - protein, 8 aa, synthetic construct
KLEKMPSI

SEQ ID NO: 18945 - protein, 10 aa, synthetic construct
DVNEPKFLSH

SEQ ID NO: 18946 - protein, 9 aa, synthetic construct
NYTLRKVIL

SEQ ID NO: 18947 - protein, 9 aa, synthetic construct
IVKVMKIKL

SEQ ID NO: 18948 - protein, 9 aa, synthetic construct
LFMLQKKVI

SEQ ID NO: 18949 - protein, 10 aa, synthetic construct
GDSTIRVIKY

SEQ ID NO: 18950 - protein, 11 aa, synthetic construct
ADTGLKLPDFQ

SEQ ID NO: 18951 - protein, 8 aa, synthetic construct
KQILKTQK

SEQ ID NO: 18952 - protein, 9 aa, synthetic construct
KAGLISLVK

SEQ ID NO: 18953 - protein, 10 aa, synthetic construct
MTITFLPYTF

SEQ ID NO: 18954 - protein, 8 aa, synthetic construct
KQILHMRV

SEQ ID NO: 18955 - protein, 9 aa, synthetic construct
KQYELTQLV

SEQ ID NO: 18956 - protein, 11 aa, synthetic construct
PSLAMILVNSF

SEQ ID NO: 18957 - protein, 9 aa, synthetic construct
RKSAVFVLK

SEQ ID NO: 18958 - protein, 9 aa, synthetic construct
LLAFPFVKL

SEQ ID NO: 18959 - protein, 10 aa, synthetic construct
QPGALRLLRL

SEQ ID NO: 18960 - protein, 13 aa, synthetic construct
GRAPAASASSPTL

SEQ ID NO: 18961 - protein, 11 aa, synthetic construct
TVMSVAGKYTL

SEQ ID NO: 18962 - protein, 13 aa, synthetic construct
KLMGTVSSPPPLA

SEQ ID NO: 18963 - protein, 12 aa, synthetic construct
RVSFGFINARFL

SEQ ID NO: 18964 - protein, 11 aa, synthetic construct
LKRFDDKYTLK

SEQ ID NO: 18965 - protein, 10 aa, synthetic construct
EWEKENRTTM

SEQ ID NO: 18966 - protein, 10 aa, synthetic construct
YNRYRYIMTY

SEQ ID NO: 18967 - protein, 9 aa, synthetic construct
RNYSMIVMF

SEQ ID NO: 18968 - protein, 10 aa, synthetic construct
RGVTFGLEAK

SEQ ID NO: 18969 - protein, 12 aa, synthetic construct
ARIYGLGSLALY

SEQ ID NO: 18970 - protein, 9 aa, synthetic construct
TKIKMNQQK

SEQ ID NO: 18971 - protein, 11 aa, synthetic construct
RGFKLNIWDVG

SEQ ID NO: 18972 - protein, 11 aa, synthetic construct
VSAGGGRRVSF

SEQ ID NO: 18973 - protein, 12 aa, synthetic construct
VGQRFILSSTGF

SEQ ID NO: 18974 - protein, 9 aa, synthetic construct
TLFLRIKFF

SEQ ID NO: 18975 - protein, 11 aa, synthetic construct
LNRMATLFLGG

SEQ ID NO: 18976 - protein, 12 aa, synthetic construct
KAYDKAVASFKH

SEQ ID NO: 18977 - protein, 9 aa, synthetic construct
FNQVIKVNI

SEQ ID NO: 18978 - protein, 9 aa, synthetic construct
VCLKSLKNI

SEQ ID NO: 18979 - protein, 9 aa, synthetic construct
RQAVKFVNI

SEQ ID NO: 18980 - protein, 10 aa, synthetic construct
ILEARFVNIA

SEQ ID NO: 18981 - protein, 10 aa, synthetic construct
TIRHTGKKSF

SEQ ID NO: 18982 - protein, 10 aa, synthetic construct
VGPKHGSLRL

SEQ ID NO: 18983 - protein, 10 aa, synthetic construct
LKMKTSRAFF

SEQ ID NO: 18984 - protein, 13 aa, synthetic construct
PGLRPPPRPGSGG

SEQ ID NO: 18985 - protein, 10 aa, synthetic construct
NESLLKARAL

SEQ ID NO: 18986 - protein, 9 aa, synthetic construct
ERVKLLNHL

SEQ ID NO: 18987 - protein, 10 aa, synthetic construct
IRSVVALHNL

SEQ ID NO: 18988 - protein, 9 aa, synthetic construct
KRIEVMVGM

SEQ ID NO: 18989 - protein, 11 aa, synthetic construct
IQKGVAEKTVL

SEQ ID NO: 18990 - protein, 9 aa, synthetic construct
AIIRRSLQF

SEQ ID NO: 18991 - protein, 10 aa, synthetic construct
ALKIAKLLLT

SEQ ID NO: 18992 - protein, 9 aa, synthetic construct
EGKEKKVNI

SEQ ID NO: 18993 - protein, 12 aa, synthetic construct
KKVPSRKIRIGG

SEQ ID NO: 18994 - protein, 10 aa, synthetic construct
TQMLNVIFTR

SEQ ID NO: 18995 - protein, 11 aa, synthetic construct
PEPPPAPRLTY

SEQ ID NO: 18996 - protein, 10 aa, synthetic construct
SNKAMVRKAF

SEQ ID NO: 18997 - protein, 9 aa, synthetic construct
VRVKEEVFI

SEQ ID NO: 18998 - protein, 11 aa, synthetic construct
LGLATRTVTNF

SEQ ID NO: 18999 - protein, 9 aa, synthetic construct
IRLEKEISK

SEQ ID NO: 19000 - protein, 9 aa, synthetic construct
KKPKKGLVF

SEQ ID NO: 19001 - protein, 9 aa, synthetic construct
RLGLLKVVF

SEQ ID NO: 19002 - protein, 9 aa, synthetic construct
AGLRKLIGF

SEQ ID NO: 19003 - protein, 11 aa, synthetic construct
VLGAVKALGFA

SEQ ID NO: 19004 - protein, 11 aa, synthetic construct
LVNIGLKAFAF

SEQ ID NO: 19005 - protein, 11 aa, synthetic construct
IVKYINPKEAE

SEQ ID NO: 19006 - protein, 9 aa, synthetic construct
TIVQRFKEY

SEQ ID NO: 19007 - protein, 10 aa, synthetic construct
RFLFFVLSYF

SEQ ID NO: 19008 - protein, 11 aa, synthetic construct
RAASQRGGEAI

SEQ ID NO: 19009 - protein, 10 aa, synthetic construct
AQSDKVFHAL

SEQ ID NO: 19010 - protein, 13 aa, synthetic construct
EKKAMAIADALGK

SEQ ID NO: 19011 - protein, 10 aa, synthetic construct
DRALKGVLRV

SEQ ID NO: 19012 - protein, 9 aa, synthetic construct
AKPRNLLLK

SEQ ID NO: 19013 - protein, 11 aa, synthetic construct
GFEKLLVSSIE

SEQ ID NO: 19014 - protein, 9 aa, synthetic construct
WGQKLLEFI

SEQ ID NO: 19015 - protein, 9 aa, synthetic construct
YRNSKLTRL

SEQ ID NO: 19016 - protein, 9 aa, synthetic construct
TREKIEAKI

SEQ ID NO: 19017 - protein, 9 aa, synthetic construct
ALKKKNGEY

SEQ ID NO: 19018 - protein, 9 aa, synthetic construct
LRTLLSQGY

SEQ ID NO: 19019 - protein, 9 aa, synthetic construct
KALLERTGY

SEQ ID NO: 19020 - protein, 9 aa, synthetic construct
LKLIKEKTV

SEQ ID NO: 19021 - protein, 9 aa, synthetic construct
LRTKLLSLK

SEQ ID NO: 19022 - protein, 9 aa, synthetic construct
IKLSRSAQL

SEQ ID NO: 19023 - protein, 10 aa, synthetic construct
KISKPIRAEF

SEQ ID NO: 19024 - protein, 9 aa, synthetic construct
VKDRILENI

SEQ ID NO: 19025 - protein, 10 aa, synthetic construct
RALTADYALL

SEQ ID NO: 19026 - protein, 10 aa, synthetic construct
QPLLLLYTTY

SEQ ID NO: 19027 - protein, 10 aa, synthetic construct
KKVYDFLSTF

SEQ ID NO: 19028 - protein, 10 aa, synthetic construct
YRVKLKSGFL

SEQ ID NO: 19029 - protein, 10 aa, synthetic construct
KHALPLKYIQ

SEQ ID NO: 19030 - protein, 9 aa, synthetic construct
HLSRYIVHL

SEQ ID NO: 19031 - protein, 9 aa, synthetic construct
KKQRNDVHL

SEQ ID NO: 19032 - protein, 10 aa, synthetic construct
QTKLESERIL

SEQ ID NO: 19033 - protein, 12 aa, synthetic construct
GLALSDLIQKYF

SEQ ID NO: 19034 - protein, 10 aa, synthetic construct
KSDLIGMKGI

SEQ ID NO: 19035 - protein, 12 aa, synthetic construct
GVIPPPGGASPL

SEQ ID NO: 19036 - protein, 9 aa, synthetic construct
KSSWIFMRV

SEQ ID NO: 19037 - protein, 14 aa, synthetic construct
SVGLFGAETQQSKV

SEQ ID NO: 19038 - protein, 11 aa, synthetic construct
KPAMGGFGIDY

SEQ ID NO: 19039 - protein, 9 aa, synthetic construct
EQANLWFSK

SEQ ID NO: 19040 - protein, 9 aa, synthetic construct
KTQEHGLFY

SEQ ID NO: 19041 - protein, 9 aa, synthetic construct
FKSFEGLFY

SEQ ID NO: 19042 - protein, 9 aa, synthetic construct
EFILKAFSK

SEQ ID NO: 19043 - protein, 11 aa, synthetic construct
TRSSVITSARE

SEQ ID NO: 19044 - protein, 9 aa, synthetic construct
KSLDLLTMK

SEQ ID NO: 19045 - protein, 9 aa, synthetic construct
SILRPIPTM

SEQ ID NO: 19046 - protein, 9 aa, synthetic construct
LSKNEYFSL

SEQ ID NO: 19047 - protein, 10 aa, synthetic construct
SLKEASSEHL

SEQ ID NO: 19048 - protein, 8 aa, synthetic construct
KSVPQFSI

SEQ ID NO: 19049 - protein, 9 aa, synthetic construct
FTVKESSTF

SEQ ID NO: 19050 - protein, 9 aa, synthetic construct
IAKTSLSFY

SEQ ID NO: 19051 - protein, 9 aa, synthetic construct
VSDWKILVF

SEQ ID NO: 19052 - protein, 12 aa, synthetic construct
LLANLPPAKPGK

SEQ ID NO: 19053 - protein, 13 aa, synthetic construct
ASTTSSVASGTEY

SEQ ID NO: 19054 - protein, 11 aa, synthetic construct
SPAGHHPHVLY

SEQ ID NO: 19055 - protein, 10 aa, synthetic construct
SVSRQPSFTY

SEQ ID NO: 19056 - protein, 10 aa, synthetic construct
SAEALTIQQY

SEQ ID NO: 19057 - protein, 11 aa, synthetic construct
PTQTPEELAFY

SEQ ID NO: 19058 - protein, 10 aa, synthetic construct
LNSKGTDFFY

SEQ ID NO: 19059 - protein, 11 aa, synthetic construct
KESIDLVLDRI

SEQ ID NO: 19060 - protein, 9 aa, synthetic construct
EKYLSLQLF

SEQ ID NO: 19061 - protein, 9 aa, synthetic construct
IENLTKVYK

SEQ ID NO: 19062 - protein, 10 aa, synthetic construct
KTLALLFVGA

SEQ ID NO: 19063 - protein, 9 aa, synthetic construct
SKIMELLQV

SEQ ID NO: 19064 - protein, 9 aa, synthetic construct
LIEKSRVVY

SEQ ID NO: 19065 - protein, 9 aa, synthetic construct
KLSFESKVI

SEQ ID NO: 19066 - protein, 12 aa, synthetic construct
VIRSLVADGVAE

SEQ ID NO: 19067 - protein, 11 aa, synthetic construct
FETSVGYAIFK

SEQ ID NO: 19068 - protein, 9 aa, synthetic construct
YLSHMGPVK

SEQ ID NO: 19069 - protein, 9 aa, synthetic construct
YGVDMHVVK

SEQ ID NO: 19070 - protein, 9 aa, synthetic construct
IKVQGILSY

SEQ ID NO: 19071 - protein, 10 aa, synthetic construct
SLALSCFLNY

SEQ ID NO: 19072 - protein, 10 aa, synthetic construct
LFDHKALTLK

SEQ ID NO: 19073 - protein, 10 aa, synthetic construct
WIMALPLKTL

SEQ ID NO: 19074 - protein, 9 aa, synthetic construct
IKTMKPPLM

SEQ ID NO: 19075 - protein, 9 aa, synthetic construct
KVNYVVQEA

SEQ ID NO: 19076 - protein, 10 aa, synthetic construct
IKRAGGEISY

SEQ ID NO: 19077 - protein, 10 aa, synthetic construct
VKLSFINEGK

SEQ ID NO: 19078 - protein, 10 aa, synthetic construct
DILKLNASSK

SEQ ID NO: 19079 - protein, 10 aa, synthetic construct
KVADLILEKQ

SEQ ID NO: 19080 - protein, 10 aa, synthetic construct
KVAAPDWTFL

SEQ ID NO: 19081 - protein, 9 aa, synthetic construct
QILHIQPVK

SEQ ID NO: 19082 - protein, 9 aa, synthetic construct
KVEVKLINL

SEQ ID NO: 19083 - protein, 10 aa, synthetic construct
KVLDKATVPI

SEQ ID NO: 19084 - protein, 9 aa, synthetic construct
KVLELAIRH

SEQ ID NO: 19085 - protein, 9 aa, synthetic construct
KSKKHIPIQ

SEQ ID NO: 19086 - protein, 9 aa, synthetic construct
VKVLEYVIK

SEQ ID NO: 19087 - protein, 9 aa, synthetic construct
KVLYQSHLL

SEQ ID NO: 19088 - protein, 11 aa, synthetic construct
SLTTSIPPLPK

SEQ ID NO: 19089 - protein, 10 aa, synthetic construct
KVFLESAALI

SEQ ID NO: 19090 - protein, 9 aa, synthetic construct
KVTNTMRKL

SEQ ID NO: 19091 - protein, 10 aa, synthetic construct
KVETFSGVYK

SEQ ID NO: 19092 - protein, 10 aa, synthetic construct
VKVLEARGLG

SEQ ID NO: 19093 - protein, 10 aa, synthetic construct
KVVEREEAVP

SEQ ID NO: 19094 - protein, 10 aa, synthetic construct
TTVALPCIYY

SEQ ID NO: 19095 - protein, 10 aa, synthetic construct
VKTGRSTVHL

SEQ ID NO: 19096 - protein, 9 aa, synthetic construct
KVMREVKAL

SEQ ID NO: 19097 - protein, 9 aa, synthetic construct
ESRTDRIVY

SEQ ID NO: 19098 - protein, 10 aa, synthetic construct
EGKYGGMELF

SEQ ID NO: 19099 - protein, 11 aa, synthetic construct
SVDSDLNQIYF

SEQ ID NO: 19100 - protein, 10 aa, synthetic construct
KYPTSKAVYI

SEQ ID NO: 19101 - protein, 11 aa, synthetic construct
QPPSGTELPAF

SEQ ID NO: 19102 - protein, 8 aa, synthetic construct
KYLEEQLT

SEQ ID NO: 19103 - protein, 8 aa, synthetic construct
KYEELQTL

SEQ ID NO: 19104 - protein, 9 aa, synthetic construct
KDYKIKLNF

SEQ ID NO: 19105 - protein, 11 aa, synthetic construct
WHGGPDGLYEY

SEQ ID NO: 19106 - protein, 10 aa, synthetic construct
IPMADEYYEY

SEQ ID NO: 19107 - protein, 11 aa, synthetic construct
RGTVAHVSWEL

SEQ ID NO: 19108 - protein, 10 aa, synthetic construct
FYKWLVFSAE

SEQ ID NO: 19109 - protein, 8 aa, synthetic construct
KYPGIRQI

SEQ ID NO: 19110 - protein, 9 aa, synthetic construct
YKVEQKVFL

SEQ ID NO: 19111 - protein, 11 aa, synthetic construct
KYVKLNVGGAL

SEQ ID NO: 19112 - protein, 11 aa, synthetic construct
IPPPLQDGALG

SEQ ID NO: 19113 - protein, 9 aa, synthetic construct
GKQRTENVL

SEQ ID NO: 19114 - protein, 9 aa, synthetic construct
KDAEKYAKF

SEQ ID NO: 19115 - protein, 9 aa, synthetic construct
HLLCPVVLK

SEQ ID NO: 19116 - protein, 11 aa, synthetic construct
DVMAYNKLNVF

SEQ ID NO: 19117 - protein, 12 aa, synthetic construct
AQFKSSVAILMK

SEQ ID NO: 19118 - protein, 11 aa, synthetic construct
LPAPFTSPTEI

SEQ ID NO: 19119 - protein, 11 aa, synthetic construct
SASKIIVFVTF

SEQ ID NO: 19120 - protein, 11 aa, synthetic construct
LKYDCDLEQLI

SEQ ID NO: 19121 - protein, 10 aa, synthetic construct
MSLYSVLYMS

SEQ ID NO: 19122 - protein, 9 aa, synthetic construct
KVSQFIHLY

SEQ ID NO: 19123 - protein, 11 aa, synthetic construct
PSPVLPQANIF

SEQ ID NO: 19124 - protein, 11 aa, synthetic construct
QPISSPVILQF

SEQ ID NO: 19125 - protein, 10 aa, synthetic construct
YVIGDLKILF

SEQ ID NO: 19126 - protein, 13 aa, synthetic construct
VAPVAGQLHSVAF

SEQ ID NO: 19127 - protein, 9 aa, synthetic construct
KMISSFVKL

SEQ ID NO: 19128 - protein, 9 aa, synthetic construct
TVLEHPNFF

SEQ ID NO: 19129 - protein, 8 aa, synthetic construct
KYLAWRHL

SEQ ID NO: 19130 - protein, 9 aa, synthetic construct
TWYKEAFIL

SEQ ID NO: 19131 - protein, 9 aa, synthetic construct
LSFQFPFVF

SEQ ID NO: 19132 - protein, 9 aa, synthetic construct
FSQKNYVVF

SEQ ID NO: 19133 - protein, 9 aa, synthetic construct
VQRVCFVIF

SEQ ID NO: 19134 - protein, 10 aa, synthetic construct
SVFLNINETF

SEQ ID NO: 19135 - protein, 10 aa, synthetic construct
KCPAPATLLW

SEQ ID NO: 19136 - protein, 9 aa, synthetic construct
AFFRGEIMF

SEQ ID NO: 19137 - protein, 9 aa, synthetic construct
FKEQSFVYK

SEQ ID NO: 19138 - protein, 9 aa, synthetic construct
KYLAVRLAL

SEQ ID NO: 19139 - protein, 9 aa, synthetic construct
KYVCTYLSV

SEQ ID NO: 19140 - protein, 9 aa, synthetic construct
IISVKYYNL

SEQ ID NO: 19141 - protein, 9 aa, synthetic construct
LKHHHVTLE

SEQ ID NO: 19142 - protein, 11 aa, synthetic construct
THLAVNGFLLF

SEQ ID NO: 19143 - protein, 11 aa, synthetic construct
GVTTAHDNFDF

SEQ ID NO: 19144 - protein, 10 aa, synthetic construct
VAVTVAMHFL

SEQ ID NO: 19145 - protein, 9 aa, synthetic construct
DIFCSLVEL

SEQ ID NO: 19146 - protein, 11 aa, synthetic construct
LSPGSGMVTHY

SEQ ID NO: 19147 - protein, 10 aa, synthetic construct
TKTPGVMDHY

SEQ ID NO: 19148 - protein, 9 aa, synthetic construct
KKPTKTPQM

SEQ ID NO: 19149 - protein, 9 aa, synthetic construct
YKVMEQMVL

SEQ ID NO: 19150 - protein, 9 aa, synthetic construct
ESFKMDLIL

SEQ ID NO: 19151 - protein, 8 aa, synthetic construct
MGIKFLEV

SEQ ID NO: 19152 - protein, 10 aa, synthetic construct
PWESGYALSL

SEQ ID NO: 19153 - protein, 10 aa, synthetic construct
AENGDRFISL

SEQ ID NO: 19154 - protein, 11 aa, synthetic construct
TATADHNLLLY

SEQ ID NO: 19155 - protein, 10 aa, synthetic construct
PMPGTHTVTL

SEQ ID NO: 19156 - protein, 10 aa, synthetic construct
TAEQGHNVTL

SEQ ID NO: 19157 - protein, 9 aa, synthetic construct
YAYTVVGIT

SEQ ID NO: 19158 - protein, 9 aa, synthetic construct
LAALPVGLS

SEQ ID NO: 19159 - protein, 8 aa, synthetic construct
LTQLWSGF

SEQ ID NO: 19160 - protein, 9 aa, synthetic construct
AAICLPLLY

SEQ ID NO: 19161 - protein, 9 aa, synthetic construct
ALAPGRGYV

SEQ ID NO: 19162 - protein, 9 aa, synthetic construct
ALIPLGSVI

SEQ ID NO: 19163 - protein, 10 aa, synthetic construct
EVAALTGGEF

SEQ ID NO: 19164 - protein, 9 aa, synthetic construct
VEEAVILTY

SEQ ID NO: 19165 - protein, 9 aa, synthetic construct
VAIDEISLF

SEQ ID NO: 19166 - protein, 9 aa, synthetic construct
IDALSCLYV

SEQ ID NO: 19167 - protein, 9 aa, synthetic construct
DLAGQILIY

SEQ ID NO: 19168 - protein, 10 aa, synthetic construct
TAVEFLSKAV

SEQ ID NO: 19169 - protein, 9 aa, synthetic construct
LEGLDALAP

SEQ ID NO: 19170 - protein, 9 aa, synthetic construct
VSAMTLLEF

SEQ ID NO: 19171 - protein, 10 aa, synthetic construct
LAEANGTFAL

SEQ ID NO: 19172 - protein, 9 aa, synthetic construct
LSAPSIVSM

SEQ ID NO: 19173 - protein, 9 aa, synthetic construct
LAHRDYKAC

SEQ ID NO: 19174 - protein, 11 aa, synthetic construct
ALHFLGGSMNS

SEQ ID NO: 19175 - protein, 9 aa, synthetic construct
LAHMFERMV

SEQ ID NO: 19176 - protein, 9 aa, synthetic construct
LAHLQESQA

SEQ ID NO: 19177 - protein, 8 aa, synthetic construct
LAHLQSFL

SEQ ID NO: 19178 - protein, 8 aa, synthetic construct
IAHWVVMR

SEQ ID NO: 19179 - protein, 11 aa, synthetic construct
IAHCRHELLGP

SEQ ID NO: 19180 - protein, 8 aa, synthetic construct
IALTNFSL

SEQ ID NO: 19181 - protein, 9 aa, synthetic construct
ALLYTTPVQ

SEQ ID NO: 19182 - protein, 9 aa, synthetic construct
ALEKGRIAI

SEQ ID NO: 19183 - protein, 8 aa, synthetic construct
LAKLREQL

SEQ ID NO: 19184 - protein, 8 aa, synthetic construct
LAKVVKTL

SEQ ID NO: 19185 - protein, 9 aa, synthetic construct
TASAIAIAL

SEQ ID NO: 19186 - protein, 11 aa, synthetic construct
LAEVATTNGHK

SEQ ID NO: 19187 - protein, 9 aa, synthetic construct
LLAEAGVPY

SEQ ID NO: 19188 - protein, 9 aa, synthetic construct
LSLPLTTNY

SEQ ID NO: 19189 - protein, 9 aa, synthetic construct
LLFAPGVAL

SEQ ID NO: 19190 - protein, 11 aa, synthetic construct
KQEALLAAISE

SEQ ID NO: 19191 - protein, 12 aa, synthetic construct
FSLAILNVGAPA

SEQ ID NO: 19192 - protein, 11 aa, synthetic construct
ELALITQAVQS

SEQ ID NO: 19193 - protein, 9 aa, synthetic construct
LALQGGIRL

SEQ ID NO: 19194 - protein, 9 aa, synthetic construct
TPINLASAI

SEQ ID NO: 19195 - protein, 10 aa, synthetic construct
ALEGLEVMDV

SEQ ID NO: 19196 - protein, 11 aa, synthetic construct
LASAASAVESL

SEQ ID NO: 19197 - protein, 9 aa, synthetic construct
PHIASVTLA

SEQ ID NO: 19198 - protein, 9 aa, synthetic construct
ALTPLYLLS

SEQ ID NO: 19199 - protein, 10 aa, synthetic construct
AIQPVLSGLA

SEQ ID NO: 19200 - protein, 9 aa, synthetic construct
ALGVEGVVL

SEQ ID NO: 19201 - protein, 9 aa, synthetic construct
IAEGPVSSL

SEQ ID NO: 19202 - protein, 9 aa, synthetic construct
AIPSSGSLV

SEQ ID NO: 19203 - protein, 9 aa, synthetic construct
IAPETLRVA

SEQ ID NO: 19204 - protein, 9 aa, synthetic construct
LALASRFYI

SEQ ID NO: 19205 - protein, 12 aa, synthetic construct
LAHGLATCYVNK

SEQ ID NO: 19206 - protein, 9 aa, synthetic construct
LATDIDYLI

SEQ ID NO: 19207 - protein, 9 aa, synthetic construct
AVTLLEFYE

SEQ ID NO: 19208 - protein, 10 aa, synthetic construct
IEPLNDTMAI

SEQ ID NO: 19209 - protein, 9 aa, synthetic construct
LALKGEELM

SEQ ID NO: 19210 - protein, 8 aa, synthetic construct
ISQVLATY

SEQ ID NO: 19211 - protein, 9 aa, synthetic construct
TGFEIIQSI

SEQ ID NO: 19212 - protein, 9 aa, synthetic construct
VSLDVSIVF

SEQ ID NO: 19213 - protein, 8 aa, synthetic construct
ILRKDPEI

SEQ ID NO: 19214 - protein, 10 aa, synthetic construct
ILGEVRTPLV

SEQ ID NO: 19215 - protein, 9 aa, synthetic construct
IAVHPEKGL

SEQ ID NO: 19216 - protein, 10 aa, synthetic construct
IAVLEAIGGQ

SEQ ID NO: 19217 - protein, 10 aa, synthetic construct
LAVDQEAHSK

SEQ ID NO: 19218 - protein, 11 aa, synthetic construct
LDDLREQPQKL

SEQ ID NO: 19219 - protein, 8 aa, synthetic construct
LVEKLLRE

SEQ ID NO: 19220 - protein, 11 aa, synthetic construct
LDLKSPVSRVE

SEQ ID NO: 19221 - protein, 11 aa, synthetic construct
EVLRLLKEGAD

SEQ ID NO: 19222 - protein, 9 aa, synthetic construct
LLDDNIPEE

SEQ ID NO: 19223 - protein, 11 aa, synthetic construct
LDGRKMGDAQP

SEQ ID NO: 19224 - protein, 10 aa, synthetic construct
DIEPLLQDSS

SEQ ID NO: 19225 - protein, 9 aa, synthetic construct
LDDIQDLIY

SEQ ID NO: 19226 - protein, 7 aa, synthetic construct
VELYRLL

SEQ ID NO: 19227 - protein, 12 aa, synthetic construct
INGTLYQPGAVV

SEQ ID NO: 19228 - protein, 9 aa, synthetic construct
IDDKEERIS

SEQ ID NO: 19229 - protein, 14 aa, synthetic construct
GAEGSLSAAAALFS

SEQ ID NO: 19230 - protein, 11 aa, synthetic construct
DDDSLARILSF

SEQ ID NO: 19231 - protein, 11 aa, synthetic construct
DIFGEPLNLYA

SEQ ID NO: 19232 - protein, 10 aa, synthetic construct
IDHDKRAYSF

SEQ ID NO: 19233 - protein, 12 aa, synthetic construct
VRGPQSSSSLSF

SEQ ID NO: 19234 - protein, 10 aa, synthetic construct
LEDTQLWISF

SEQ ID NO: 19235 - protein, 9 aa, synthetic construct
IDVLHPGKA

SEQ ID NO: 19236 - protein, 8 aa, synthetic construct
VEVSKMKI

SEQ ID NO: 19237 - protein, 9 aa, synthetic construct
LEGVENKLI

SEQ ID NO: 19238 - protein, 10 aa, synthetic construct
LEPATRDGAP

SEQ ID NO: 19239 - protein, 10 aa, synthetic construct
IEALRGTMDP

SEQ ID NO: 19240 - protein, 9 aa, synthetic construct
QLTAIEILA

SEQ ID NO: 19241 - protein, 9 aa, synthetic construct
FLEAQAATG

SEQ ID NO: 19242 - protein, 9 aa, synthetic construct
TQPSVTAFG

SEQ ID NO: 19243 - protein, 9 aa, synthetic construct
TATPAKDFG

SEQ ID NO: 19244 - protein, 8 aa, synthetic construct
QAPRMGTF

SEQ ID NO: 19245 - protein, 9 aa, synthetic construct
LEAQGDLLE

SEQ ID NO: 19246 - protein, 8 aa, synthetic construct
LELGIPKL

SEQ ID NO: 19247 - protein, 8 aa, synthetic construct
LECDKLAS

SEQ ID NO: 19248 - protein, 11 aa, synthetic construct
EIADIEEGRID

SEQ ID NO: 19249 - protein, 12 aa, synthetic construct
LEDALTQEANVG

SEQ ID NO: 19250 - protein, 10 aa, synthetic construct
DLEIRELVTG

SEQ ID NO: 19251 - protein, 10 aa, synthetic construct
LDEIVKEVEA

SEQ ID NO: 19252 - protein, 10 aa, synthetic construct
IDELNQALKT

SEQ ID NO: 19253 - protein, 10 aa, synthetic construct
LEDLEVLSRA

SEQ ID NO: 19254 - protein, 9 aa, synthetic construct
ELRDIPLRP

SEQ ID NO: 19255 - protein, 11 aa, synthetic construct
ELEALRGELED

SEQ ID NO: 19256 - protein, 8 aa, synthetic construct
IEWRNKYI

SEQ ID NO: 19257 - protein, 8 aa, synthetic construct
IEEIQKEA

SEQ ID NO: 19258 - protein, 8 aa, synthetic construct
LEIELQSQ

SEQ ID NO: 19259 - protein, 8 aa, synthetic construct
LEELQLNT

SEQ ID NO: 19260 - protein, 9 aa, synthetic construct
ELQESGLAL

SEQ ID NO: 19261 - protein, 11 aa, synthetic construct
LEQELQELRAQ

SEQ ID NO: 19262 - protein, 10 aa, synthetic construct
LTQKITTMQK

SEQ ID NO: 19263 - protein, 9 aa, synthetic construct
IEFENLVES

SEQ ID NO: 19264 - protein, 9 aa, synthetic construct
LEFCSVFKP

SEQ ID NO: 19265 - protein, 11 aa, synthetic construct
LWSEILMTGGA

SEQ ID NO: 19266 - protein, 11 aa, synthetic construct
LEFLCLADLSS

SEQ ID NO: 19267 - protein, 9 aa, synthetic construct
LSRVELHKN

SEQ ID NO: 19268 - protein, 7 aa, synthetic construct
ELNQEDF

SEQ ID NO: 19269 - protein, 11 aa, synthetic construct
STPNSMTDLES

SEQ ID NO: 19270 - protein, 10 aa, synthetic construct
SSHRNMFSSE

SEQ ID NO: 19271 - protein, 10 aa, synthetic construct
SAPRDCPVQC

SEQ ID NO: 19272 - protein, 9 aa, synthetic construct
VLDHALESL

SEQ ID NO: 19273 - protein, 8 aa, synthetic construct
LEHLTGNK

SEQ ID NO: 19274 - protein, 9 aa, synthetic construct
LSHVPFSSL

SEQ ID NO: 19275 - protein, 8 aa, synthetic construct
EHLVPLHV

SEQ ID NO: 19276 - protein, 9 aa, synthetic construct
IIETPHKEI

SEQ ID NO: 19277 - protein, 9 aa, synthetic construct
EIIHTIEKP

SEQ ID NO: 19278 - protein, 11 aa, synthetic construct
LELPPASGPAK

SEQ ID NO: 19279 - protein, 11 aa, synthetic construct
EIIDGSYLNAL

SEQ ID NO: 19280 - protein, 9 aa, synthetic construct
LELFSNPSA

SEQ ID NO: 19281 - protein, 8 aa, synthetic construct
QLHLSQEL

SEQ ID NO: 19282 - protein, 9 aa, synthetic construct
EILNRYIYF

SEQ ID NO: 19283 - protein, 9 aa, synthetic construct
LELLRQLEA

SEQ ID NO: 19284 - protein, 9 aa, synthetic construct
LIEEVPLGQ

SEQ ID NO: 19285 - protein, 9 aa, synthetic construct
LLEVMVNLL

SEQ ID NO: 19286 - protein, 8 aa, synthetic construct
YIEAILEL

SEQ ID NO: 19287 - protein, 9 aa, synthetic construct
NKKFIIANA

SEQ ID NO: 19288 - protein, 9 aa, synthetic construct
LEQGLAAPA

SEQ ID NO: 19289 - protein, 9 aa, synthetic construct
LHSQFLLEA

SEQ ID NO: 19290 - protein, 9 aa, synthetic construct
LEGLPQPGL

SEQ ID NO: 19291 - protein, 9 aa, synthetic construct
LELSFLTSA

SEQ ID NO: 19292 - protein, 10 aa, synthetic construct
MEIDLKDLEA

SEQ ID NO: 19293 - protein, 8 aa, synthetic construct
EIENIQTY

SEQ ID NO: 19294 - protein, 8 aa, synthetic construct
LEEIFMSF

SEQ ID NO: 19295 - protein, 9 aa, synthetic construct
ELYQTSGSF

SEQ ID NO: 19296 - protein, 9 aa, synthetic construct
IQEQVKQLL

SEQ ID NO: 19297 - protein, 12 aa, synthetic construct
SGAAAVPGIPAA

SEQ ID NO: 19298 - protein, 10 aa, synthetic construct
CNATLRLPSL

SEQ ID NO: 19299 - protein, 8 aa, synthetic construct
LETLHQLA

SEQ ID NO: 19300 - protein, 10 aa, synthetic construct
FLSESVLAVA

SEQ ID NO: 19301 - protein, 9 aa, synthetic construct
CPKAPGPLA

SEQ ID NO: 19302 - protein, 8 aa, synthetic construct
IEQYATRL

SEQ ID NO: 19303 - protein, 9 aa, synthetic construct
IEVKFASEA

SEQ ID NO: 19304 - protein, 8 aa, synthetic construct
KVGERYEI

SEQ ID NO: 19305 - protein, 9 aa, synthetic construct
LEHPDALAK

SEQ ID NO: 19306 - protein, 9 aa, synthetic construct
LEVERLQGL

SEQ ID NO: 19307 - protein, 10 aa, synthetic construct
LLEVEVIEGT

SEQ ID NO: 19308 - protein, 10 aa, synthetic construct
ALEVFPEFAA

SEQ ID NO: 19309 - protein, 8 aa, synthetic construct
LEHVWKGF

SEQ ID NO: 19310 - protein, 9 aa, synthetic construct
IVLIDSTPC

SEQ ID NO: 19311 - protein, 10 aa, synthetic construct
LSDSDALIVP

SEQ ID NO: 19312 - protein, 10 aa, synthetic construct
TAGAQPSLTA

SEQ ID NO: 19313 - protein, 12 aa, synthetic construct
LEIYNGASPDKG

SEQ ID NO: 19314 - protein, 9 aa, synthetic construct
LMSKTCLEV

SEQ ID NO: 19315 - protein, 8 aa, synthetic construct
LEYQARLE

SEQ ID NO: 19316 - protein, 8 aa, synthetic construct
EYLTAEIL

SEQ ID NO: 19317 - protein, 9 aa, synthetic construct
LEPSHVVQV

SEQ ID NO: 19318 - protein, 10 aa, synthetic construct
TREEADEYID

SEQ ID NO: 19319 - protein, 9 aa, synthetic construct
FLDYTTDNM

SEQ ID NO: 19320 - protein, 10 aa, synthetic construct
IFDSPSPEED

SEQ ID NO: 19321 - protein, 8 aa, synthetic construct
LFHMLFEL

SEQ ID NO: 19322 - protein, 9 aa, synthetic construct
FQINGKDNK

SEQ ID NO: 19323 - protein, 9 aa, synthetic construct
FLPTHSFKS

SEQ ID NO: 19324 - protein, 9 aa, synthetic construct
FDEGTINFI

SEQ ID NO: 19325 - protein, 9 aa, synthetic construct
LIDFGANIY

SEQ ID NO: 19326 - protein, 8 aa, synthetic construct
LFDVHSIL

SEQ ID NO: 19327 - protein, 9 aa, synthetic construct
LFLERLSIL

SEQ ID NO: 19328 - protein, 11 aa, synthetic construct
LFLGQNPVIGI

SEQ ID NO: 19329 - protein, 8 aa, synthetic construct
IFIRNVLL

SEQ ID NO: 19330 - protein, 8 aa, synthetic construct
TFLGLTGD

SEQ ID NO: 19331 - protein, 10 aa, synthetic construct
GSSTWERYFI

SEQ ID NO: 19332 - protein, 10 aa, synthetic construct
LFSSPQHPFE

SEQ ID NO: 19333 - protein, 9 aa, synthetic construct
LFSILCGFW

SEQ ID NO: 19334 - protein, 10 aa, synthetic construct
LFPRSFKNSS

SEQ ID NO: 19335 - protein, 10 aa, synthetic construct
IYSALMIRSE

SEQ ID NO: 19336 - protein, 10 aa, synthetic construct
FLSLSERSIM

SEQ ID NO: 19337 - protein, 9 aa, synthetic construct
LFMRMACAK

SEQ ID NO: 19338 - protein, 7 aa, synthetic construct
MPTTHQI

SEQ ID NO: 19339 - protein, 10 aa, synthetic construct
AAQVALAKQL

SEQ ID NO: 19340 - protein, 11 aa, synthetic construct
PSSVPLGSEKP

SEQ ID NO: 19341 - protein, 8 aa, synthetic construct
DLGLEGTY

SEQ ID NO: 19342 - protein, 7 aa, synthetic construct
LLENTDY

SEQ ID NO: 19343 - protein, 8 aa, synthetic construct
LIDGAESY

SEQ ID NO: 19344 - protein, 8 aa, synthetic construct
ANGLTIDY

SEQ ID NO: 19345 - protein, 9 aa, synthetic construct
QEAPKELVI

SEQ ID NO: 19346 - protein, 9 aa, synthetic construct
LSLAEGWQL

SEQ ID NO: 19347 - protein, 10 aa, synthetic construct
FAINMETGWI

SEQ ID NO: 19348 - protein, 8 aa, synthetic construct
GLHGNWTL

SEQ ID NO: 19349 - protein, 9 aa, synthetic construct
GLHGNWTLE

SEQ ID NO: 19350 - protein, 11 aa, synthetic construct
VKKVTQEAAVI

SEQ ID NO: 19351 - protein, 9 aa, synthetic construct
AVIGIDDED

SEQ ID NO: 19352 - protein, 9 aa, synthetic construct
LGLLEGVRG

SEQ ID NO: 19353 - protein, 8 aa, synthetic construct
LGIPLNVI

SEQ ID NO: 19354 - protein, 10 aa, synthetic construct
SDHQVEGVKG

SEQ ID NO: 19355 - protein, 11 aa, synthetic construct
APPSGPTVAPL

SEQ ID NO: 19356 - protein, 9 aa, synthetic construct
LGPPSASAI

SEQ ID NO: 19357 - protein, 9 aa, synthetic construct
VAVLSVNHI

SEQ ID NO: 19358 - protein, 10 aa, synthetic construct
LGVHASFQMS

SEQ ID NO: 19359 - protein, 10 aa, synthetic construct
GAAQNLDLAY

SEQ ID NO: 19360 - protein, 9 aa, synthetic construct
MDGPLPLHY

SEQ ID NO: 19361 - protein, 12 aa, synthetic construct
KLDMDLSTGALP

SEQ ID NO: 19362 - protein, 12 aa, synthetic construct
ALCALMVMAAPL

SEQ ID NO: 19363 - protein, 10 aa, synthetic construct
LESFQSPGFA

SEQ ID NO: 19364 - protein, 10 aa, synthetic construct
ASFEKEATEA

SEQ ID NO: 19365 - protein, 13 aa, synthetic construct
ADLPSEPADPAPL

SEQ ID NO: 19366 - protein, 12 aa, synthetic construct
AFLDGFNEVAPL

SEQ ID NO: 19367 - protein, 10 aa, synthetic construct
VLWMWNFALP

SEQ ID NO: 19368 - protein, 8 aa, synthetic construct
LHSVSHLA

SEQ ID NO: 19369 - protein, 12 aa, synthetic construct
HILLFGMGRGVL

SEQ ID NO: 19370 - protein, 9 aa, synthetic construct
IHPESQATI

SEQ ID NO: 19371 - protein, 8 aa, synthetic construct
LHQEFHGK

SEQ ID NO: 19372 - protein, 8 aa, synthetic construct
IHRNREGN

SEQ ID NO: 19373 - protein, 9 aa, synthetic construct
IHVPESNSI

SEQ ID NO: 19374 - protein, 10 aa, synthetic construct
HLPSPLEEGS

SEQ ID NO: 19375 - protein, 10 aa, synthetic construct
IIAARNGHAK

SEQ ID NO: 19376 - protein, 9 aa, synthetic construct
LLAALFAFW

SEQ ID NO: 19377 - protein, 10 aa, synthetic construct
ILRNAILSRA

SEQ ID NO: 19378 - protein, 9 aa, synthetic construct
DEQILLLVC

SEQ ID NO: 19379 - protein, 9 aa, synthetic construct
IAEVILYSE

SEQ ID NO: 19380 - protein, 10 aa, synthetic construct
LVEETSLTVS

SEQ ID NO: 19381 - protein, 8 aa, synthetic construct
LLLQQFKE

SEQ ID NO: 19382 - protein, 8 aa, synthetic construct
LLFRDILE

SEQ ID NO: 19383 - protein, 9 aa, synthetic construct
LIFRDEIDL

SEQ ID NO: 19384 - protein, 8 aa, synthetic construct
LIRLRFYL

SEQ ID NO: 19385 - protein, 9 aa, synthetic construct
LFLSVLVML

SEQ ID NO: 19386 - protein, 9 aa, synthetic construct
ILGGSGPVR

SEQ ID NO: 19387 - protein, 8 aa, synthetic construct
LLNSGVPR

SEQ ID NO: 19388 - protein, 7 aa, synthetic construct
ILHLENR

SEQ ID NO: 19389 - protein, 7 aa, synthetic construct
LLHENRL

SEQ ID NO: 19390 - protein, 7 aa, synthetic construct
LIDHQLR

SEQ ID NO: 19391 - protein, 8 aa, synthetic construct
ILHSTAPR

SEQ ID NO: 19392 - protein, 8 aa, synthetic construct
ILHIREEI

SEQ ID NO: 19393 - protein, 8 aa, synthetic construct
IHILEREL

SEQ ID NO: 19394 - protein, 9 aa, synthetic construct
IIHLSVINN

SEQ ID NO: 19395 - protein, 8 aa, synthetic construct
LIIYWLTF

SEQ ID NO: 19396 - protein, 9 aa, synthetic construct
TLFPLLTLL

SEQ ID NO: 19397 - protein, 8 aa, synthetic construct
LLQNFLNS

SEQ ID NO: 19398 - protein, 8 aa, synthetic construct
ILQPPFFS

SEQ ID NO: 19399 - protein, 9 aa, synthetic construct
LLNSLPVSF

SEQ ID NO: 19400 - protein, 8 aa, synthetic construct
LLSERPPR

SEQ ID NO: 19401 - protein, 9 aa, synthetic construct
LLLSAHSRA

SEQ ID NO: 19402 - protein, 10 aa, synthetic construct
IISPSAMLPI

SEQ ID NO: 19403 - protein, 9 aa, synthetic construct
LIYGILKSQ

SEQ ID NO: 19404 - protein, 8 aa, synthetic construct
LSLFNTYK

SEQ ID NO: 19405 - protein, 9 aa, synthetic construct
LEKIPENAE

SEQ ID NO: 19406 - protein, 9 aa, synthetic construct
LEKLENEPA

SEQ ID NO: 19407 - protein, 11 aa, synthetic construct
DGDSLALLPAA

SEQ ID NO: 19408 - protein, 9 aa, synthetic construct
LTASVTEAI

SEQ ID NO: 19409 - protein, 8 aa, synthetic construct
LLKAVPCF

SEQ ID NO: 19410 - protein, 8 aa, synthetic construct
LKHLKIFS

SEQ ID NO: 19411 - protein, 11 aa, synthetic construct
ILKIPSAKGKN

SEQ ID NO: 19412 - protein, 11 aa, synthetic construct
EVLRVLQLSDT

SEQ ID NO: 19413 - protein, 11 aa, synthetic construct
SLQLKNIQLTD

SEQ ID NO: 19414 - protein, 10 aa, synthetic construct
QKLLADSHRL

SEQ ID NO: 19415 - protein, 10 aa, synthetic construct
KAQLLRFFAS

SEQ ID NO: 19416 - protein, 11 aa, synthetic construct
ILQAKPEPVSV

SEQ ID NO: 19417 - protein, 8 aa, synthetic construct
KRRNRFVK

SEQ ID NO: 19418 - protein, 9 aa, synthetic construct
EILEGITIV

SEQ ID NO: 19419 - protein, 9 aa, synthetic construct
LIAEVKKQL

SEQ ID NO: 19420 - protein, 9 aa, synthetic construct
YGEQALIID

SEQ ID NO: 19421 - protein, 10 aa, synthetic construct
VELLALLDAG

SEQ ID NO: 19422 - protein, 11 aa, synthetic construct
LIPMTGKPSLY

SEQ ID NO: 19423 - protein, 10 aa, synthetic construct
LLQGEDRLYL

SEQ ID NO: 19424 - protein, 9 aa, synthetic construct
EDFVLLLTY

SEQ ID NO: 19425 - protein, 9 aa, synthetic construct
IEVGDVNPS

SEQ ID NO: 19426 - protein, 9 aa, synthetic construct
DGLTDALLY

SEQ ID NO: 19427 - protein, 9 aa, synthetic construct
SLDTEVLTI

SEQ ID NO: 19428 - protein, 9 aa, synthetic construct
LDAELIELG

SEQ ID NO: 19429 - protein, 9 aa, synthetic construct
IIMQERASY

SEQ ID NO: 19430 - protein, 9 aa, synthetic construct
GPSSLIINL

SEQ ID NO: 19431 - protein, 9 aa, synthetic construct
VPLTSPVAL

SEQ ID NO: 19432 - protein, 12 aa, synthetic construct
EVLSVSNRAGLI

SEQ ID NO: 19433 - protein, 9 aa, synthetic construct
VTLLDLELY

SEQ ID NO: 19434 - protein, 9 aa, synthetic construct
IIDMALSEY

SEQ ID NO: 19435 - protein, 10 aa, synthetic construct
LLDQSFKNVQ

SEQ ID NO: 19436 - protein, 10 aa, synthetic construct
LLPTHVPASL

SEQ ID NO: 19437 - protein, 10 aa, synthetic construct
LIGMTALLTV

SEQ ID NO: 19438 - protein, 8 aa, synthetic construct
LVETVSEY

SEQ ID NO: 19439 - protein, 9 aa, synthetic construct
LLSEEVELY

SEQ ID NO: 19440 - protein, 9 aa, synthetic construct
SIEELDIIY

SEQ ID NO: 19441 - protein, 9 aa, synthetic construct
LESLVTNML

SEQ ID NO: 19442 - protein, 9 aa, synthetic construct
VILDGIPTA

SEQ ID NO: 19443 - protein, 8 aa, synthetic construct
RRQTPALG

SEQ ID NO: 19444 - protein, 9 aa, synthetic construct
VEIVTIPSL

SEQ ID NO: 19445 - protein, 8 aa, synthetic construct
MIANTYLL

SEQ ID NO: 19446 - protein, 10 aa, synthetic construct
FLGISLELIY

SEQ ID NO: 19447 - protein, 9 aa, synthetic construct
ILGLYFNVV

SEQ ID NO: 19448 - protein, 9 aa, synthetic construct
ALLGPDPAA

SEQ ID NO: 19449 - protein, 9 aa, synthetic construct
LVAPPLPAA

SEQ ID NO: 19450 - protein, 9 aa, synthetic construct
LLVPAVRLA

SEQ ID NO: 19451 - protein, 10 aa, synthetic construct
ILSGAQRIHD

SEQ ID NO: 19452 - protein, 9 aa, synthetic construct
LLHLEQPKP

SEQ ID NO: 19453 - protein, 9 aa, synthetic construct
LLLDRHLLF

SEQ ID NO: 19454 - protein, 9 aa, synthetic construct
AVENLLLLS

SEQ ID NO: 19455 - protein, 9 aa, synthetic construct
IIENIVAVT

SEQ ID NO: 19456 - protein, 8 aa, synthetic construct
LLLPLQTA

SEQ ID NO: 19457 - protein, 11 aa, synthetic construct
LLLPDHVITRL

SEQ ID NO: 19458 - protein, 8 aa, synthetic construct
IKLPREIL

SEQ ID NO: 19459 - protein, 8 aa, synthetic construct
LLKRLLEP

SEQ ID NO: 19460 - protein, 9 aa, synthetic construct
ENGAVKLLL

SEQ ID NO: 19461 - protein, 10 aa, synthetic construct
MRLQELTDLL

SEQ ID NO: 19462 - protein, 9 aa, synthetic construct
LLLRYSGEF

SEQ ID NO: 19463 - protein, 10 aa, synthetic construct
VRRAATPAAV

SEQ ID NO: 19464 - protein, 10 aa, synthetic construct
LLIDNARMAV

SEQ ID NO: 19465 - protein, 10 aa, synthetic construct
LLIDNEKVTS

SEQ ID NO: 19466 - protein, 11 aa, synthetic construct
IILSAPNPEGK

SEQ ID NO: 19467 - protein, 10 aa, synthetic construct
LLLGVYGMGF

SEQ ID NO: 19468 - protein, 8 aa, synthetic construct
LLLCSVPL

SEQ ID NO: 19469 - protein, 10 aa, synthetic construct
LLLSRSAIYL

SEQ ID NO: 19470 - protein, 8 aa, synthetic construct
LIPAVLHL

SEQ ID NO: 19471 - protein, 11 aa, synthetic construct
AGAHLSSFLLL

SEQ ID NO: 19472 - protein, 9 aa, synthetic construct
KVLEHVPLL

SEQ ID NO: 19473 - protein, 8 aa, synthetic construct
LLPDLAAK

SEQ ID NO: 19474 - protein, 8 aa, synthetic construct
LLAPDALK

SEQ ID NO: 19475 - protein, 9 aa, synthetic construct
IIIEQPVSD

SEQ ID NO: 19476 - protein, 9 aa, synthetic construct
LLGAFLCPA

SEQ ID NO: 19477 - protein, 9 aa, synthetic construct
ILKYDEEGG

SEQ ID NO: 19478 - protein, 9 aa, synthetic construct
YPASHSILL

SEQ ID NO: 19479 - protein, 12 aa, synthetic construct
LLPGHTGEVRQV

SEQ ID NO: 19480 - protein, 12 aa, synthetic construct
GHRPLSDAARII

SEQ ID NO: 19481 - protein, 10 aa, synthetic construct
LLQPLNITQV

SEQ ID NO: 19482 - protein, 11 aa, synthetic construct
LLGAPGELLKQ

SEQ ID NO: 19483 - protein, 8 aa, synthetic construct
LIQVFKEF

SEQ ID NO: 19484 - protein, 8 aa, synthetic construct
LQLNYFLL

SEQ ID NO: 19485 - protein, 8 aa, synthetic construct
LLQNLLFY

SEQ ID NO: 19486 - protein, 9 aa, synthetic construct
ASRVLLVGL

SEQ ID NO: 19487 - protein, 9 aa, synthetic construct
LAIGLRLKL

SEQ ID NO: 19488 - protein, 9 aa, synthetic construct
SVLDVPLGP

SEQ ID NO: 19489 - protein, 11 aa, synthetic construct
VTVTGPPAPPA

SEQ ID NO: 19490 - protein, 9 aa, synthetic construct
LIVETAISF

SEQ ID NO: 19491 - protein, 10 aa, synthetic construct
LLETLLGHSL

SEQ ID NO: 19492 - protein, 9 aa, synthetic construct
ILYELKVEL

SEQ ID NO: 19493 - protein, 9 aa, synthetic construct
LCHPIYKLL

SEQ ID NO: 19494 - protein, 10 aa, synthetic construct
LIYEMLVGES

SEQ ID NO: 19495 - protein, 10 aa, synthetic construct
PEPASRCLLL

SEQ ID NO: 19496 - protein, 9 aa, synthetic construct
HSVVLLMLL

SEQ ID NO: 19497 - protein, 9 aa, synthetic construct
YVGEIITSE

SEQ ID NO: 19498 - protein, 10 aa, synthetic construct
ILSAKGKNVQ

SEQ ID NO: 19499 - protein, 9 aa, synthetic construct
ILMRVTVLP

SEQ ID NO: 19500 - protein, 8 aa, synthetic construct
FPECVKKL

SEQ ID NO: 19501 - protein, 9 aa, synthetic construct
NDLLERMDI

SEQ ID NO: 19502 - protein, 7 aa, synthetic construct
ERMYANL

SEQ ID NO: 19503 - protein, 8 aa, synthetic construct
LNFRSEEM

SEQ ID NO: 19504 - protein, 12 aa, synthetic construct
KDATGSEDYENL

SEQ ID NO: 19505 - protein, 7 aa, synthetic construct
IINLATQ

SEQ ID NO: 19506 - protein, 11 aa, synthetic construct
LEDYLEMIEQL

SEQ ID NO: 19507 - protein, 11 aa, synthetic construct
FELMQNMLEQL

SEQ ID NO: 19508 - protein, 12 aa, synthetic construct
EGEDVKTTEYQL

SEQ ID NO: 19509 - protein, 9 aa, synthetic construct
VGPVDAQVY

SEQ ID NO: 19510 - protein, 9 aa, synthetic construct
AGYYLVVYY

SEQ ID NO: 19511 - protein, 9 aa, synthetic construct
LFYGTVMVM

SEQ ID NO: 19512 - protein, 9 aa, synthetic construct
IPQNMLDVM

SEQ ID NO: 19513 - protein, 9 aa, synthetic construct
EKVPFVQTY

SEQ ID NO: 19514 - protein, 12 aa, synthetic construct
LGSLEPSAIPND

SEQ ID NO: 19515 - protein, 10 aa, synthetic construct
YMDEPGLVPE

SEQ ID NO: 19516 - protein, 9 aa, synthetic construct
IEPGVQYNY

SEQ ID NO: 19517 - protein, 9 aa, synthetic construct
TNDLPALAF

SEQ ID NO: 19518 - protein, 9 aa, synthetic construct
VEFSYPPLI

SEQ ID NO: 19519 - protein, 10 aa, synthetic construct
LSFGSPSFSF

SEQ ID NO: 19520 - protein, 10 aa, synthetic construct
PIVLHTAPLL

SEQ ID NO: 19521 - protein, 10 aa, synthetic construct
PLAPKHIKGI

SEQ ID NO: 19522 - protein, 9 aa, synthetic construct
KHVHLLTII

SEQ ID NO: 19523 - protein, 10 aa, synthetic construct
LFAYGGWNYL

SEQ ID NO: 19524 - protein, 8 aa, synthetic construct
IQPQLPSF

SEQ ID NO: 19525 - protein, 8 aa, synthetic construct
LPQVLAVI

SEQ ID NO: 19526 - protein, 8 aa, synthetic construct
LPQSIDRL

SEQ ID NO: 19527 - protein, 10 aa, synthetic construct
LPGSGKLNKD

SEQ ID NO: 19528 - protein, 8 aa, synthetic construct
IPHLASLL

SEQ ID NO: 19529 - protein, 9 aa, synthetic construct
PRIELLHNI

SEQ ID NO: 19530 - protein, 11 aa, synthetic construct
LPDSMKVLPVY

SEQ ID NO: 19531 - protein, 9 aa, synthetic construct
LPLIAKEVF

SEQ ID NO: 19532 - protein, 9 aa, synthetic construct
IAIPFGTAL

SEQ ID NO: 19533 - protein, 9 aa, synthetic construct
IPLAFSEYL

SEQ ID NO: 19534 - protein, 8 aa, synthetic construct
IVSWLSTY

SEQ ID NO: 19535 - protein, 10 aa, synthetic construct
PALLRETKIL

SEQ ID NO: 19536 - protein, 9 aa, synthetic construct
VSFELDKVF

SEQ ID NO: 19537 - protein, 9 aa, synthetic construct
LPGLPGWPA

SEQ ID NO: 19538 - protein, 10 aa, synthetic construct
IPAPSSAWLL

SEQ ID NO: 19539 - protein, 9 aa, synthetic construct
ALPPGLPAS

SEQ ID NO: 19540 - protein, 9 aa, synthetic construct
PALMLPLAF

SEQ ID NO: 19541 - protein, 10 aa, synthetic construct
LEFLKAHTMY

SEQ ID NO: 19542 - protein, 9 aa, synthetic construct
IPAVISLWF

SEQ ID NO: 19543 - protein, 10 aa, synthetic construct
LPAPSGQAPM

SEQ ID NO: 19544 - protein, 8 aa, synthetic construct
LKTFSQNM

SEQ ID NO: 19545 - protein, 10 aa, synthetic construct
APLPSAGDLF

SEQ ID NO: 19546 - protein, 9 aa, synthetic construct
LVPAPVLVL

SEQ ID NO: 19547 - protein, 10 aa, synthetic construct
YESVQGLPAF

SEQ ID NO: 19548 - protein, 9 aa, synthetic construct
LPADQLCQH

SEQ ID NO: 19549 - protein, 8 aa, synthetic construct
EPQQLLLF

SEQ ID NO: 19550 - protein, 10 aa, synthetic construct
IPANPNMSPL

SEQ ID NO: 19551 - protein, 9 aa, synthetic construct
LSVPGNATL

SEQ ID NO: 19552 - protein, 8 aa, synthetic construct
LDIIQQEY

SEQ ID NO: 19553 - protein, 10 aa, synthetic construct
IGGLPAPEMY

SEQ ID NO: 19554 - protein, 9 aa, synthetic construct
ISGERVPQF

SEQ ID NO: 19555 - protein, 8 aa, synthetic construct
LPSQDLLF

SEQ ID NO: 19556 - protein, 9 aa, synthetic construct
IQGASLPAL

SEQ ID NO: 19557 - protein, 9 aa, synthetic construct
SLPASPSVI

SEQ ID NO: 19558 - protein, 8 aa, synthetic construct
INILITSI

SEQ ID NO: 19559 - protein, 9 aa, synthetic construct
TLSPLGETY

SEQ ID NO: 19560 - protein, 8 aa, synthetic construct
LPENHIVF

SEQ ID NO: 19561 - protein, 9 aa, synthetic construct
IPAHQAEIL

SEQ ID NO: 19562 - protein, 10 aa, synthetic construct
RDGLEAAAVL

SEQ ID NO: 19563 - protein, 8 aa, synthetic construct
CPLSNLLL

SEQ ID NO: 19564 - protein, 10 aa, synthetic construct
ESFLLSTSTM

SEQ ID NO: 19565 - protein, 9 aa, synthetic construct
FHTEVAEPL

SEQ ID NO: 19566 - protein, 9 aa, synthetic construct
PSLWELVFD

SEQ ID NO: 19567 - protein, 9 aa, synthetic construct
TQHTLISPY

SEQ ID NO: 19568 - protein, 9 aa, synthetic construct
LGDLPQMEL

SEQ ID NO: 19569 - protein, 9 aa, synthetic construct
PMADLSFIE

SEQ ID NO: 19570 - protein, 9 aa, synthetic construct
KSYSHSALL

SEQ ID NO: 19571 - protein, 8 aa, synthetic construct
LDMMHKEI

SEQ ID NO: 19572 - protein, 10 aa, synthetic construct
IGLEGGMPEI

SEQ ID NO: 19573 - protein, 8 aa, synthetic construct
SWEDIFEL

SEQ ID NO: 19574 - protein, 12 aa, synthetic construct
QDQNDQHGETPL

SEQ ID NO: 19575 - protein, 9 aa, synthetic construct
ISALPEDDF

SEQ ID NO: 19576 - protein, 10 aa, synthetic construct
LPLCSAPEVY

SEQ ID NO: 19577 - protein, 10 aa, synthetic construct
GQNGELLSLI

SEQ ID NO: 19578 - protein, 10 aa, synthetic construct
LPNGKNLSSL

SEQ ID NO: 19579 - protein, 9 aa, synthetic construct
PDWRQNMGP

SEQ ID NO: 19580 - protein, 8 aa, synthetic construct
LVMENNVL

SEQ ID NO: 19581 - protein, 11 aa, synthetic construct
LVDQERGTGVY

SEQ ID NO: 19582 - protein, 9 aa, synthetic construct
PLGDRDSLL

SEQ ID NO: 19583 - protein, 9 aa, synthetic construct
LPDGRVTDI

SEQ ID NO: 19584 - protein, 10 aa, synthetic construct
PDLGSAQKGL

SEQ ID NO: 19585 - protein, 9 aa, synthetic construct
LLDPKVITI

SEQ ID NO: 19586 - protein, 9 aa, synthetic construct
DPKLLTASL

SEQ ID NO: 19587 - protein, 11 aa, synthetic construct
LGYGGATWVVY

SEQ ID NO: 19588 - protein, 11 aa, synthetic construct
AKSSRFLSFLL

SEQ ID NO: 19589 - protein, 9 aa, synthetic construct
LYSKTSHSY

SEQ ID NO: 19590 - protein, 9 aa, synthetic construct
LPEPLNELM

SEQ ID NO: 19591 - protein, 9 aa, synthetic construct
LNQPVPELS

SEQ ID NO: 19592 - protein, 9 aa, synthetic construct
LPDRVLNFL

SEQ ID NO: 19593 - protein, 9 aa, synthetic construct
AYFGNYFTY

SEQ ID NO: 19594 - protein, 8 aa, synthetic construct
VLQETPEY

SEQ ID NO: 19595 - protein, 9 aa, synthetic construct
DLSSLDPSY

SEQ ID NO: 19596 - protein, 9 aa, synthetic construct
LSPDTKQAS

SEQ ID NO: 19597 - protein, 10 aa, synthetic construct
PTATSPLTSY

SEQ ID NO: 19598 - protein, 8 aa, synthetic construct
VDMLNDIY

SEQ ID NO: 19599 - protein, 9 aa, synthetic construct
LGDLMELVF

SEQ ID NO: 19600 - protein, 10 aa, synthetic construct
LMHAVDPEIP

SEQ ID NO: 19601 - protein, 9 aa, synthetic construct
MALHFLILL

SEQ ID NO: 19602 - protein, 8 aa, synthetic construct
PICNPRIL

SEQ ID NO: 19603 - protein, 10 aa, synthetic construct
LPCSPIVAQY

SEQ ID NO: 19604 - protein, 11 aa, synthetic construct
VAVLSYSPPGY

SEQ ID NO: 19605 - protein, 12 aa, synthetic construct
PESIGQMTSLLY

SEQ ID NO: 19606 - protein, 10 aa, synthetic construct
LGAPESLTTM

SEQ ID NO: 19607 - protein, 9 aa, synthetic construct
EGLPTPIIY

SEQ ID NO: 19608 - protein, 9 aa, synthetic construct
FEHSVETPL

SEQ ID NO: 19609 - protein, 12 aa, synthetic construct
GRGGGGGGALEY

SEQ ID NO: 19610 - protein, 8 aa, synthetic construct
LPFAAAQI

SEQ ID NO: 19611 - protein, 9 aa, synthetic construct
AEFPELAAF

SEQ ID NO: 19612 - protein, 8 aa, synthetic construct
DLGAMLLY

SEQ ID NO: 19613 - protein, 9 aa, synthetic construct
LPAFTVWCG

SEQ ID NO: 19614 - protein, 10 aa, synthetic construct
IVLTPELEGA

SEQ ID NO: 19615 - protein, 9 aa, synthetic construct
WSFDRTYPL

SEQ ID NO: 19616 - protein, 10 aa, synthetic construct
LFDPMTGTFR

SEQ ID NO: 19617 - protein, 11 aa, synthetic construct
QPQASQTLTPL

SEQ ID NO: 19618 - protein, 9 aa, synthetic construct
LPFSNESFI

SEQ ID NO: 19619 - protein, 9 aa, synthetic construct
IPFDRFSLA

SEQ ID NO: 19620 - protein, 9 aa, synthetic construct
LDKGSGVVI

SEQ ID NO: 19621 - protein, 12 aa, synthetic construct
IPFGGGARSCLG

SEQ ID NO: 19622 - protein, 9 aa, synthetic construct
LPFFVLDAF

SEQ ID NO: 19623 - protein, 13 aa, synthetic construct
PLFPLNGSHDLGI

SEQ ID NO: 19624 - protein, 9 aa, synthetic construct
IPKVGFTNI

SEQ ID NO: 19625 - protein, 8 aa, synthetic construct
LSICPLYF

SEQ ID NO: 19626 - protein, 9 aa, synthetic construct
LFFPHMLSG

SEQ ID NO: 19627 - protein, 8 aa, synthetic construct
PLWRYQEL

SEQ ID NO: 19628 - protein, 8 aa, synthetic construct
LLQTKEDY

SEQ ID NO: 19629 - protein, 12 aa, synthetic construct
LLPTLICDIAGY

SEQ ID NO: 19630 - protein, 10 aa, synthetic construct
EKSVRLNEKM

SEQ ID NO: 19631 - protein, 9 aa, synthetic construct
FPINFLTLY

SEQ ID NO: 19632 - protein, 9 aa, synthetic construct
PFILTRISI

SEQ ID NO: 19633 - protein, 12 aa, synthetic construct
IPFMVDPSFTTG

SEQ ID NO: 19634 - protein, 12 aa, synthetic construct
LPKEEDEGKVEM

SEQ ID NO: 19635 - protein, 13 aa, synthetic construct
LANGHEPDETALH

SEQ ID NO: 19636 - protein, 12 aa, synthetic construct
FIPMDVMHSTPL

SEQ ID NO: 19637 - protein, 12 aa, synthetic construct
RDGNGKLGLVEF

SEQ ID NO: 19638 - protein, 10 aa, synthetic construct
LPFLPLGFQS

SEQ ID NO: 19639 - protein, 10 aa, synthetic construct
IPFPAGVVTS

SEQ ID NO: 19640 - protein, 9 aa, synthetic construct
FPIPKLDML

SEQ ID NO: 19641 - protein, 9 aa, synthetic construct
IPHQKDPAL

SEQ ID NO: 19642 - protein, 10 aa, synthetic construct
LVSMSPPHAL

SEQ ID NO: 19643 - protein, 11 aa, synthetic construct
AQLVYQPSDIY

SEQ ID NO: 19644 - protein, 10 aa, synthetic construct
GKLDQCSEPL

SEQ ID NO: 19645 - protein, 10 aa, synthetic construct
SFPAMITPAY

SEQ ID NO: 19646 - protein, 9 aa, synthetic construct
FLGVDMERF

SEQ ID NO: 19647 - protein, 8 aa, synthetic construct
LPFTIISM

SEQ ID NO: 19648 - protein, 12 aa, synthetic construct
IAASRPYCGLGY

SEQ ID NO: 19649 - protein, 8 aa, synthetic construct
LEPGDLLY

SEQ ID NO: 19650 - protein, 8 aa, synthetic construct
IQPPSLTF

SEQ ID NO: 19651 - protein, 9 aa, synthetic construct
KMDLEGMYL

SEQ ID NO: 19652 - protein, 8 aa, synthetic construct
LPQPCFPA

SEQ ID NO: 19653 - protein, 9 aa, synthetic construct
IPQNASTYS

SEQ ID NO: 19654 - protein, 8 aa, synthetic construct
IPMLVYVY

SEQ ID NO: 19655 - protein, 9 aa, synthetic construct
YLSPAVPFS

SEQ ID NO: 19656 - protein, 8 aa, synthetic construct
LPGGLVSM

SEQ ID NO: 19657 - protein, 10 aa, synthetic construct
LLAMAGVAGM

SEQ ID NO: 19658 - protein, 8 aa, synthetic construct
IVSCVLQM

SEQ ID NO: 19659 - protein, 8 aa, synthetic construct
IQVFKSEM

SEQ ID NO: 19660 - protein, 10 aa, synthetic construct
IPHVFPSCPL

SEQ ID NO: 19661 - protein, 9 aa, synthetic construct
PLHPETYKY

SEQ ID NO: 19662 - protein, 11 aa, synthetic construct
ATFSFTLGSTY

SEQ ID NO: 19663 - protein, 9 aa, synthetic construct
LPHHRRGAR

SEQ ID NO: 19664 - protein, 10 aa, synthetic construct
LPSVPVFLEV

SEQ ID NO: 19665 - protein, 9 aa, synthetic construct
SELPHLVSW

SEQ ID NO: 19666 - protein, 9 aa, synthetic construct
CFILLLVSY

SEQ ID NO: 19667 - protein, 9 aa, synthetic construct
QSKYNALSL

SEQ ID NO: 19668 - protein, 11 aa, synthetic construct
VLDIDALMAEY

SEQ ID NO: 19669 - protein, 9 aa, synthetic construct
LPHVNLRVT

SEQ ID NO: 19670 - protein, 9 aa, synthetic construct
TPPHSKPLY

SEQ ID NO: 19671 - protein, 9 aa, synthetic construct
IPKIGMTTY

SEQ ID NO: 19672 - protein, 9 aa, synthetic construct
LPFTMKKIY

SEQ ID NO: 19673 - protein, 9 aa, synthetic construct
LAHPSSLTI

SEQ ID NO: 19674 - protein, 8 aa, synthetic construct
DKDGRPLY

SEQ ID NO: 19675 - protein, 8 aa, synthetic construct
IIHPTQDF

SEQ ID NO: 19676 - protein, 9 aa, synthetic construct
LPVNGFRSY

SEQ ID NO: 19677 - protein, 10 aa, synthetic construct
VLEIICTEEY

SEQ ID NO: 19678 - protein, 9 aa, synthetic construct
LPAIASSSL

SEQ ID NO: 19679 - protein, 9 aa, synthetic construct
SPILALEEI

SEQ ID NO: 19680 - protein, 9 aa, synthetic construct
DINDQIPIF

SEQ ID NO: 19681 - protein, 10 aa, synthetic construct
ISYKTGEMIT

SEQ ID NO: 19682 - protein, 11 aa, synthetic construct
LVEPEVTSTPL

SEQ ID NO: 19683 - protein, 9 aa, synthetic construct
IPIEGRNTR

SEQ ID NO: 19684 - protein, 11 aa, synthetic construct
IPLAEMEALSL

SEQ ID NO: 19685 - protein, 9 aa, synthetic construct
LLEPGPSFP

SEQ ID NO: 19686 - protein, 11 aa, synthetic construct
LPELTPAERDD

SEQ ID NO: 19687 - protein, 11 aa, synthetic construct
LLPEMAHLSGG

SEQ ID NO: 19688 - protein, 9 aa, synthetic construct
LPVGATINM

SEQ ID NO: 19689 - protein, 9 aa, synthetic construct
LPLNLDTQY

SEQ ID NO: 19690 - protein, 12 aa, synthetic construct
APTLSVPTPDPE

SEQ ID NO: 19691 - protein, 10 aa, synthetic construct
IPASVLSELL

SEQ ID NO: 19692 - protein, 12 aa, synthetic construct
IIGPDGQPLTVY

SEQ ID NO: 19693 - protein, 10 aa, synthetic construct
IFRGTGALIY

SEQ ID NO: 19694 - protein, 10 aa, synthetic construct
LPLQVPLQTY

SEQ ID NO: 19695 - protein, 11 aa, synthetic construct
IPIPVLHEGAE

SEQ ID NO: 19696 - protein, 9 aa, synthetic construct
IPNLFVVGY

SEQ ID NO: 19697 - protein, 11 aa, synthetic construct
IPLDAAAAYYL

SEQ ID NO: 19698 - protein, 9 aa, synthetic construct
EKLKAKPLL

SEQ ID NO: 19699 - protein, 9 aa, synthetic construct
IPALKTIID

SEQ ID NO: 19700 - protein, 9 aa, synthetic construct
IPKGLRPLP

SEQ ID NO: 19701 - protein, 9 aa, synthetic construct
IPNSQLIVI

SEQ ID NO: 19702 - protein, 10 aa, synthetic construct
LGPVSANITL

SEQ ID NO: 19703 - protein, 9 aa, synthetic construct
LIFAIHNFK

SEQ ID NO: 19704 - protein, 9 aa, synthetic construct
LPHTNIASL

SEQ ID NO: 19705 - protein, 10 aa, synthetic construct
TGPNLTKPLL

SEQ ID NO: 19706 - protein, 9 aa, synthetic construct
LTKVPPSSL

SEQ ID NO: 19707 - protein, 11 aa, synthetic construct
LKAGDTVIPLY

SEQ ID NO: 19708 - protein, 10 aa, synthetic construct
LPKVGSLASF

SEQ ID NO: 19709 - protein, 8 aa, synthetic construct
PLLAKKLL

SEQ ID NO: 19710 - protein, 9 aa, synthetic construct
LKPHLLVLN

SEQ ID NO: 19711 - protein, 9 aa, synthetic construct
PLEKKILNL

SEQ ID NO: 19712 - protein, 9 aa, synthetic construct
ILKPKEKIL

SEQ ID NO: 19713 - protein, 9 aa, synthetic construct
PKNDLITYL

SEQ ID NO: 19714 - protein, 9 aa, synthetic construct
IVSIVHSVF

SEQ ID NO: 19715 - protein, 9 aa, synthetic construct
LPKIMGKSS

SEQ ID NO: 19716 - protein, 8 aa, synthetic construct
LPWIMNLI

SEQ ID NO: 19717 - protein, 9 aa, synthetic construct
LPKGRPGPV

SEQ ID NO: 19718 - protein, 10 aa, synthetic construct
LKPGAPLPAL

SEQ ID NO: 19719 - protein, 9 aa, synthetic construct
IPHISILML

SEQ ID NO: 19720 - protein, 9 aa, synthetic construct
LPMWRVTAF

SEQ ID NO: 19721 - protein, 11 aa, synthetic construct
APNTPAPPASL

SEQ ID NO: 19722 - protein, 9 aa, synthetic construct
LTGLVNVSL

SEQ ID NO: 19723 - protein, 9 aa, synthetic construct
LEAAKVLEL

SEQ ID NO: 19724 - protein, 10 aa, synthetic construct
LLSLGGAIEI

SEQ ID NO: 19725 - protein, 9 aa, synthetic construct
LLPLAFVAT

SEQ ID NO: 19726 - protein, 9 aa, synthetic construct
LPGLLHLEI

SEQ ID NO: 19727 - protein, 9 aa, synthetic construct
LLPALVALA

SEQ ID NO: 19728 - protein, 9 aa, synthetic construct
LPLAQETGL

SEQ ID NO: 19729 - protein, 9 aa, synthetic construct
LPAEKAEAI

SEQ ID NO: 19730 - protein, 10 aa, synthetic construct
FLTVPVEDVY

SEQ ID NO: 19731 - protein, 10 aa, synthetic construct
VPESLLANPE

SEQ ID NO: 19732 - protein, 10 aa, synthetic construct
IVAELQAPDL

SEQ ID NO: 19733 - protein, 10 aa, synthetic construct
RGNPKQVQEY

SEQ ID NO: 19734 - protein, 9 aa, synthetic construct
PLEKVYSLL

SEQ ID NO: 19735 - protein, 9 aa, synthetic construct
LLPEGQSLL

SEQ ID NO: 19736 - protein, 11 aa, synthetic construct
LEPSNVGNLSF

SEQ ID NO: 19737 - protein, 9 aa, synthetic construct
LDPRQAGQY

SEQ ID NO: 19738 - protein, 9 aa, synthetic construct
LPKLHVVKT

SEQ ID NO: 19739 - protein, 9 aa, synthetic construct
LLPLHKVKS

SEQ ID NO: 19740 - protein, 10 aa, synthetic construct
LPLLARPAAL

SEQ ID NO: 19741 - protein, 10 aa, synthetic construct
LPHVPEHRRL

SEQ ID NO: 19742 - protein, 9 aa, synthetic construct
PLLARPAAL

SEQ ID NO: 19743 - protein, 10 aa, synthetic construct
LLPIDDYLAM

SEQ ID NO: 19744 - protein, 9 aa, synthetic construct
IPIHLCLTF

SEQ ID NO: 19745 - protein, 8 aa, synthetic construct
LLPLPFCR

SEQ ID NO: 19746 - protein, 11 aa, synthetic construct
LSGGIPVNGPR

SEQ ID NO: 19747 - protein, 11 aa, synthetic construct
PLLNQSPLHRL

SEQ ID NO: 19748 - protein, 9 aa, synthetic construct
IPLMISRNY

SEQ ID NO: 19749 - protein, 10 aa, synthetic construct
LPLDLPPPPP

SEQ ID NO: 19750 - protein, 11 aa, synthetic construct
LPVGCVRIIPY

SEQ ID NO: 19751 - protein, 9 aa, synthetic construct
PLLSRSSDL

SEQ ID NO: 19752 - protein, 9 aa, synthetic construct
PLIASSTIW

SEQ ID NO: 19753 - protein, 10 aa, synthetic construct
LPLRLGISNF

SEQ ID NO: 19754 - protein, 10 aa, synthetic construct
LPLIENISKC

SEQ ID NO: 19755 - protein, 10 aa, synthetic construct
LPLPEASYLP

SEQ ID NO: 19756 - protein, 9 aa, synthetic construct
PLIPVLEQY

SEQ ID NO: 19757 - protein, 9 aa, synthetic construct
LPGAVAQVY

SEQ ID NO: 19758 - protein, 11 aa, synthetic construct
LPLSLTCTNFV

SEQ ID NO: 19759 - protein, 10 aa, synthetic construct
LPLTDRPMSY

SEQ ID NO: 19760 - protein, 8 aa, synthetic construct
LEHFITPL

SEQ ID NO: 19761 - protein, 11 aa, synthetic construct
LPSLANGQGIY

SEQ ID NO: 19762 - protein, 9 aa, synthetic construct
AAGQRLVDY

SEQ ID NO: 19763 - protein, 12 aa, synthetic construct
LGASASGLVNMY

SEQ ID NO: 19764 - protein, 10 aa, synthetic construct
ADAERALDTM

SEQ ID NO: 19765 - protein, 10 aa, synthetic construct
LGGDVPISSI

SEQ ID NO: 19766 - protein, 9 aa, synthetic construct
VSMRTSVLF

SEQ ID NO: 19767 - protein, 10 aa, synthetic construct
TRSRRPCQEY

SEQ ID NO: 19768 - protein, 10 aa, synthetic construct
PASGPLSVFT

SEQ ID NO: 19769 - protein, 9 aa, synthetic construct
IKGMDVYGY

SEQ ID NO: 19770 - protein, 9 aa, synthetic construct
AQGPGLLVI

SEQ ID NO: 19771 - protein, 9 aa, synthetic construct
IPNRILDIL

SEQ ID NO: 19772 - protein, 11 aa, synthetic construct
IPHLGTGIGGL

SEQ ID NO: 19773 - protein, 11 aa, synthetic construct
VGLPNGLDGVE

SEQ ID NO: 19774 - protein, 10 aa, synthetic construct
LSPNISTNTS

SEQ ID NO: 19775 - protein, 9 aa, synthetic construct
VPNESIPII

SEQ ID NO: 19776 - protein, 11 aa, synthetic construct
IPHSSSATATK

SEQ ID NO: 19777 - protein, 8 aa, synthetic construct
WEHLLVMI

SEQ ID NO: 19778 - protein, 10 aa, synthetic construct
VSLHVLPATI

SEQ ID NO: 19779 - protein, 10 aa, synthetic construct
IPDTVWSIGY

SEQ ID NO: 19780 - protein, 8 aa, synthetic construct
IPDLPKSY

SEQ ID NO: 19781 - protein, 9 aa, synthetic construct
LPPPAPPFF

SEQ ID NO: 19782 - protein, 8 aa, synthetic construct
YTLTMKPL

SEQ ID NO: 19783 - protein, 9 aa, synthetic construct
LPKPLVGYL

SEQ ID NO: 19784 - protein, 10 aa, synthetic construct
LPLPPARPKL

SEQ ID NO: 19785 - protein, 9 aa, synthetic construct
LPPPSDQYP

SEQ ID NO: 19786 - protein, 9 aa, synthetic construct
LPYLPGDVY

SEQ ID NO: 19787 - protein, 9 aa, synthetic construct
QLPTVTLGF

SEQ ID NO: 19788 - protein, 8 aa, synthetic construct
LYYLLLFK

SEQ ID NO: 19789 - protein, 11 aa, synthetic construct
IPEQANAAVPD

SEQ ID NO: 19790 - protein, 10 aa, synthetic construct
EEVAGPELAL

SEQ ID NO: 19791 - protein, 11 aa, synthetic construct
ILADNGTTGKY

SEQ ID NO: 19792 - protein, 10 aa, synthetic construct
PGALELLQFS

SEQ ID NO: 19793 - protein, 9 aa, synthetic construct
LTRSSEVEY

SEQ ID NO: 19794 - protein, 9 aa, synthetic construct
LPQLGRLLD

SEQ ID NO: 19795 - protein, 9 aa, synthetic construct
LPRGQPPVF

SEQ ID NO: 19796 - protein, 10 aa, synthetic construct
LPGALTQHIP

SEQ ID NO: 19797 - protein, 9 aa, synthetic construct
LDMGKIEEM

SEQ ID NO: 19798 - protein, 10 aa, synthetic construct
IGMIGSKPFS

SEQ ID NO: 19799 - protein, 9 aa, synthetic construct
FIKAKTRPL

SEQ ID NO: 19800 - protein, 9 aa, synthetic construct
SIHPQLLVL

SEQ ID NO: 19801 - protein, 11 aa, synthetic construct
DLDSGPALLFP

SEQ ID NO: 19802 - protein, 10 aa, synthetic construct
VCLPRSPNVL

SEQ ID NO: 19803 - protein, 9 aa, synthetic construct
VDPKLGVPL

SEQ ID NO: 19804 - protein, 9 aa, synthetic construct
HDAQLIFVF

SEQ ID NO: 19805 - protein, 11 aa, synthetic construct
GTGALTAFQTY

SEQ ID NO: 19806 - protein, 10 aa, synthetic construct
LSPSAIPGVL

SEQ ID NO: 19807 - protein, 12 aa, synthetic construct
LPESAQIPQISY

SEQ ID NO: 19808 - protein, 9 aa, synthetic construct
LPAKERQTI

SEQ ID NO: 19809 - protein, 10 aa, synthetic construct
RLIPGTGQTL

SEQ ID NO: 19810 - protein, 9 aa, synthetic construct
LKYFSLQAL

SEQ ID NO: 19811 - protein, 10 aa, synthetic construct
LVGEPEGQNF

SEQ ID NO: 19812 - protein, 9 aa, synthetic construct
IIQQPQTAV

SEQ ID NO: 19813 - protein, 10 aa, synthetic construct
GLRNKHMVEL

SEQ ID NO: 19814 - protein, 11 aa, synthetic construct
LGALGGQVQAL

SEQ ID NO: 19815 - protein, 11 aa, synthetic construct
KLLTSGDLPAL

SEQ ID NO: 19816 - protein, 9 aa, synthetic construct
IHLGFGSVL

SEQ ID NO: 19817 - protein, 8 aa, synthetic construct
IPRKVQIR

SEQ ID NO: 19818 - protein, 9 aa, synthetic construct
PRGKIGLRL

SEQ ID NO: 19819 - protein, 9 aa, synthetic construct
VKRAGPRLL

SEQ ID NO: 19820 - protein, 9 aa, synthetic construct
LPVVQNLGM

SEQ ID NO: 19821 - protein, 10 aa, synthetic construct
LARAADPSVL

SEQ ID NO: 19822 - protein, 9 aa, synthetic construct
IKMKENHEF

SEQ ID NO: 19823 - protein, 9 aa, synthetic construct
LPICVIPEY

SEQ ID NO: 19824 - protein, 9 aa, synthetic construct
LPRRLKTLL

SEQ ID NO: 19825 - protein, 10 aa, synthetic construct
AEDLRPLALL

SEQ ID NO: 19826 - protein, 9 aa, synthetic construct
PLLHLKAAV

SEQ ID NO: 19827 - protein, 9 aa, synthetic construct
PPVKKQPVL

SEQ ID NO: 19828 - protein, 9 aa, synthetic construct
LTIKTAFVI

SEQ ID NO: 19829 - protein, 9 aa, synthetic construct
LEYDGHLPI

SEQ ID NO: 19830 - protein, 10 aa, synthetic construct
ILQSLDGFVF

SEQ ID NO: 19831 - protein, 10 aa, synthetic construct
TKVLSETLMF

SEQ ID NO: 19832 - protein, 10 aa, synthetic construct
PRPPMLLALL

SEQ ID NO: 19833 - protein, 11 aa, synthetic construct
HLAKGNSLLAL

SEQ ID NO: 19834 - protein, 10 aa, synthetic construct
LAIIHEEKAL

SEQ ID NO: 19835 - protein, 8 aa, synthetic construct
NKDIRKFL

SEQ ID NO: 19836 - protein, 11 aa, synthetic construct
LLELRTEIVAL

SEQ ID NO: 19837 - protein, 11 aa, synthetic construct
IMPLPAGGPSI

SEQ ID NO: 19838 - protein, 9 aa, synthetic construct
SHSPKWSLL

SEQ ID NO: 19839 - protein, 11 aa, synthetic construct
PWKVQVLTAGL

SEQ ID NO: 19840 - protein, 10 aa, synthetic construct
TALVFHLDTL

SEQ ID NO: 19841 - protein, 9 aa, synthetic construct
TLVRQLAVL

SEQ ID NO: 19842 - protein, 9 aa, synthetic construct
EVTPRTALL

SEQ ID NO: 19843 - protein, 11 aa, synthetic construct
LIRKQDATSTI

SEQ ID NO: 19844 - protein, 11 aa, synthetic construct
TVPLRTPLTQL

SEQ ID NO: 19845 - protein, 9 aa, synthetic construct
LMPRKVTLL

SEQ ID NO: 19846 - protein, 10 aa, synthetic construct
LPSPTQPAKI

SEQ ID NO: 19847 - protein, 10 aa, synthetic construct
SQMLSHTGLL

SEQ ID NO: 19848 - protein, 10 aa, synthetic construct
LSPALSQELL

SEQ ID NO: 19849 - protein, 10 aa, synthetic construct
LPSILQTGEI

SEQ ID NO: 19850 - protein, 9 aa, synthetic construct
IISDPAAEA

SEQ ID NO: 19851 - protein, 10 aa, synthetic construct
YVTVPEGLLM

SEQ ID NO: 19852 - protein, 10 aa, synthetic construct
LPTVTAAAVL

SEQ ID NO: 19853 - protein, 8 aa, synthetic construct
LRNMPLVL

SEQ ID NO: 19854 - protein, 11 aa, synthetic construct
PIKTAQGSLSL

SEQ ID NO: 19855 - protein, 9 aa, synthetic construct
VGEDVSLVL

SEQ ID NO: 19856 - protein, 9 aa, synthetic construct
LPSDVVTAV

SEQ ID NO: 19857 - protein, 9 aa, synthetic construct
VVSPDIASI

SEQ ID NO: 19858 - protein, 9 aa, synthetic construct
LALPSETGY

SEQ ID NO: 19859 - protein, 10 aa, synthetic construct
GLIETPTGYI

SEQ ID NO: 19860 - protein, 10 aa, synthetic construct
IPESAGFFSE

SEQ ID NO: 19861 - protein, 9 aa, synthetic construct
PTHQSELLL

SEQ ID NO: 19862 - protein, 9 aa, synthetic construct
LPGLQCVKY

SEQ ID NO: 19863 - protein, 9 aa, synthetic construct
LKEPSINEY

SEQ ID NO: 19864 - protein, 9 aa, synthetic construct
LPSIWDYSL

SEQ ID NO: 19865 - protein, 11 aa, synthetic construct
LETPVTGHAIP

SEQ ID NO: 19866 - protein, 10 aa, synthetic construct
EVSAPSYPGY

SEQ ID NO: 19867 - protein, 10 aa, synthetic construct
IEDVLAAASY

SEQ ID NO: 19868 - protein, 8 aa, synthetic construct
FGEKPIVI

SEQ ID NO: 19869 - protein, 8 aa, synthetic construct
PLKNGMIE

SEQ ID NO: 19870 - protein, 9 aa, synthetic construct
LSVHPLSML

SEQ ID NO: 19871 - protein, 11 aa, synthetic construct
LSPIDPVPPGG

SEQ ID NO: 19872 - protein, 9 aa, synthetic construct
LLPSLYGDY

SEQ ID NO: 19873 - protein, 9 aa, synthetic construct
IPSTVVNSI

SEQ ID NO: 19874 - protein, 9 aa, synthetic construct
IPLSPEATL

SEQ ID NO: 19875 - protein, 9 aa, synthetic construct
PSLPPQHPL

SEQ ID NO: 19876 - protein, 9 aa, synthetic construct
LPSLPGPAV

SEQ ID NO: 19877 - protein, 10 aa, synthetic construct
SPLRPLSSPL

SEQ ID NO: 19878 - protein, 10 aa, synthetic construct
LPAQEAAKIY

SEQ ID NO: 19879 - protein, 9 aa, synthetic construct
LSPQEAPFS

SEQ ID NO: 19880 - protein, 9 aa, synthetic construct
SATKQPSIL

SEQ ID NO: 19881 - protein, 9 aa, synthetic construct
LLARLQVAL

SEQ ID NO: 19882 - protein, 9 aa, synthetic construct
AVLRQLALL

SEQ ID NO: 19883 - protein, 9 aa, synthetic construct
ISPSYKTLP

SEQ ID NO: 19884 - protein, 10 aa, synthetic construct
IPSSGFLVSL

SEQ ID NO: 19885 - protein, 11 aa, synthetic construct
IISTRAGALLA

SEQ ID NO: 19886 - protein, 9 aa, synthetic construct
PISSAEMTF

SEQ ID NO: 19887 - protein, 10 aa, synthetic construct
LMAAVADVTL

SEQ ID NO: 19888 - protein, 11 aa, synthetic construct
ISRGDLLGPPI

SEQ ID NO: 19889 - protein, 9 aa, synthetic construct
VADTKMIEY

SEQ ID NO: 19890 - protein, 9 aa, synthetic construct
TPLDAIAQF

SEQ ID NO: 19891 - protein, 9 aa, synthetic construct
ALSPLALNL

SEQ ID NO: 19892 - protein, 9 aa, synthetic construct
ADNGLILLM

SEQ ID NO: 19893 - protein, 9 aa, synthetic construct
IFEDPSVLQ

SEQ ID NO: 19894 - protein, 9 aa, synthetic construct
HRFAEMYPA

SEQ ID NO: 19895 - protein, 10 aa, synthetic construct
LMDPISDPEF

SEQ ID NO: 19896 - protein, 10 aa, synthetic construct
IPETASVVAI

SEQ ID NO: 19897 - protein, 11 aa, synthetic construct
VDQTPSGLTAY

SEQ ID NO: 19898 - protein, 10 aa, synthetic construct
LAEPSLQSPP

SEQ ID NO: 19899 - protein, 9 aa, synthetic construct
LPGTLYPVI

SEQ ID NO: 19900 - protein, 9 aa, synthetic construct
TLPLKGPYI

SEQ ID NO: 19901 - protein, 10 aa, synthetic construct
LPQSAGEGPF

SEQ ID NO: 19902 - protein, 11 aa, synthetic construct
NITEGLKDVYS

SEQ ID NO: 19903 - protein, 9 aa, synthetic construct
LPTSPLAME

SEQ ID NO: 19904 - protein, 9 aa, synthetic construct
PTQLLNSYL

SEQ ID NO: 19905 - protein, 8 aa, synthetic construct
LGGEVLLY

SEQ ID NO: 19906 - protein, 9 aa, synthetic construct
SIPLLIIAF

SEQ ID NO: 19907 - protein, 9 aa, synthetic construct
LPTKPSVSY

SEQ ID NO: 19908 - protein, 8 aa, synthetic construct
PEKISSTL

SEQ ID NO: 19909 - protein, 9 aa, synthetic construct
ISQSQISEF

SEQ ID NO: 19910 - protein, 9 aa, synthetic construct
SLLGPEVVV

SEQ ID NO: 19911 - protein, 10 aa, synthetic construct
FCFTGLLSPF

SEQ ID NO: 19912 - protein, 9 aa, synthetic construct
LMYITSLFQ

SEQ ID NO: 19913 - protein, 10 aa, synthetic construct
ARQCTRLVDF

SEQ ID NO: 19914 - protein, 9 aa, synthetic construct
LPVVEKRFE

SEQ ID NO: 19915 - protein, 9 aa, synthetic construct
LAPVEVEEL

SEQ ID NO: 19916 - protein, 10 aa, synthetic construct
YNALQCIPPL

SEQ ID NO: 19917 - protein, 9 aa, synthetic construct
IPEVDLDDL

SEQ ID NO: 19918 - protein, 10 aa, synthetic construct
KDDATALNEL

SEQ ID NO: 19919 - protein, 11 aa, synthetic construct
LPLLSGVPPPP

SEQ ID NO: 19920 - protein, 11 aa, synthetic construct
LAVDPNGAFLM

SEQ ID NO: 19921 - protein, 9 aa, synthetic construct
ISVPVQEDE

SEQ ID NO: 19922 - protein, 9 aa, synthetic construct
LLTSGPATL

SEQ ID NO: 19923 - protein, 10 aa, synthetic construct
LDGLLGALTY

SEQ ID NO: 19924 - protein, 10 aa, synthetic construct
LRSPAAPEAL

SEQ ID NO: 19925 - protein, 9 aa, synthetic construct
LVLPLFVYS

SEQ ID NO: 19926 - protein, 9 aa, synthetic construct
LPVLREYIL

SEQ ID NO: 19927 - protein, 10 aa, synthetic construct
LPLVGISSYA

SEQ ID NO: 19928 - protein, 9 aa, synthetic construct
PLVLVISMS

SEQ ID NO: 19929 - protein, 9 aa, synthetic construct
LGHMNITLF

SEQ ID NO: 19930 - protein, 10 aa, synthetic construct
EVGGLPSFFG

SEQ ID NO: 19931 - protein, 9 aa, synthetic construct
VPLPPDLLL

SEQ ID NO: 19932 - protein, 9 aa, synthetic construct
PLVPPATLL

SEQ ID NO: 19933 - protein, 9 aa, synthetic construct
LPVGSPGLF

SEQ ID NO: 19934 - protein, 9 aa, synthetic construct
LPVPIVPSF

SEQ ID NO: 19935 - protein, 9 aa, synthetic construct
PVLPVTIYE

SEQ ID NO: 19936 - protein, 11 aa, synthetic construct
LVPSETNFLHF

SEQ ID NO: 19937 - protein, 8 aa, synthetic construct
VVSPLDYE

SEQ ID NO: 19938 - protein, 7 aa, synthetic construct
LDPKLCY

SEQ ID NO: 19939 - protein, 8 aa, synthetic construct
EQIVELGM

SEQ ID NO: 19940 - protein, 9 aa, synthetic construct
LISPTEAMG

SEQ ID NO: 19941 - protein, 10 aa, synthetic construct
YVPSVLEKLD

SEQ ID NO: 19942 - protein, 9 aa, synthetic construct
LPGTWLSTV

SEQ ID NO: 19943 - protein, 8 aa, synthetic construct
LPSRRSFY

SEQ ID NO: 19944 - protein, 9 aa, synthetic construct
LPLHIINCF

SEQ ID NO: 19945 - protein, 9 aa, synthetic construct
IPERTTKPY

SEQ ID NO: 19946 - protein, 9 aa, synthetic construct
FGSEFPIFS

SEQ ID NO: 19947 - protein, 10 aa, synthetic construct
LYKPMSIPDY

SEQ ID NO: 19948 - protein, 11 aa, synthetic construct
LGGHHSQALPL

SEQ ID NO: 19949 - protein, 10 aa, synthetic construct
LMHRTSACLP

SEQ ID NO: 19950 - protein, 11 aa, synthetic construct
LIMTTKNSNIY

SEQ ID NO: 19951 - protein, 9 aa, synthetic construct
LPYFRATVG

SEQ ID NO: 19952 - protein, 9 aa, synthetic construct
LPYSSPWVI

SEQ ID NO: 19953 - protein, 10 aa, synthetic construct
IPGGFICQKF

SEQ ID NO: 19954 - protein, 9 aa, synthetic construct
IPYLQAVSV

SEQ ID NO: 19955 - protein, 11 aa, synthetic construct
LDMSLDDIIIY

SEQ ID NO: 19956 - protein, 11 aa, synthetic construct
ITQIVDVFMEY

SEQ ID NO: 19957 - protein, 10 aa, synthetic construct
LLMINGLGDI

SEQ ID NO: 19958 - protein, 9 aa, synthetic construct
INYLDMEYF

SEQ ID NO: 19959 - protein, 10 aa, synthetic construct
LHYAGEVTYC

SEQ ID NO: 19960 - protein, 10 aa, synthetic construct
HLEMRSLAQF

SEQ ID NO: 19961 - protein, 8 aa, synthetic construct
LPYDNIIT

SEQ ID NO: 19962 - protein, 9 aa, synthetic construct
PLLLHSPLL

SEQ ID NO: 19963 - protein, 8 aa, synthetic construct
LVTWTVEV

SEQ ID NO: 19964 - protein, 12 aa, synthetic construct
LPCNPHGNGLLY

SEQ ID NO: 19965 - protein, 11 aa, synthetic construct
IEAREKMADIY

SEQ ID NO: 19966 - protein, 10 aa, synthetic construct
HVSQTAEEFY

SEQ ID NO: 19967 - protein, 11 aa, synthetic construct
LPGMAGLPNVF

SEQ ID NO: 19968 - protein, 7 aa, synthetic construct
LPYWRRL

SEQ ID NO: 19969 - protein, 9 aa, synthetic construct
LPYLSQEVR

SEQ ID NO: 19970 - protein, 9 aa, synthetic construct
LYPVSSSLL

SEQ ID NO: 19971 - protein, 9 aa, synthetic construct
QIPEVMGWP

SEQ ID NO: 19972 - protein, 8 aa, synthetic construct
VVEDLRDY

SEQ ID NO: 19973 - protein, 10 aa, synthetic construct
LVALSECIMY

SEQ ID NO: 19974 - protein, 8 aa, synthetic construct
AQLFAALI

SEQ ID NO: 19975 - protein, 9 aa, synthetic construct
SPSLQELPA

SEQ ID NO: 19976 - protein, 9 aa, synthetic construct
QLGMLHFST

SEQ ID NO: 19977 - protein, 9 aa, synthetic construct
LQEVREKDQ

SEQ ID NO: 19978 - protein, 9 aa, synthetic construct
VVDLFHGQL

SEQ ID NO: 19979 - protein, 8 aa, synthetic construct
LQPFVGRL

SEQ ID NO: 19980 - protein, 8 aa, synthetic construct
GQLHLPQL

SEQ ID NO: 19981 - protein, 9 aa, synthetic construct
LQIVEMPLA

SEQ ID NO: 19982 - protein, 9 aa, synthetic construct
LQLDALQRG

SEQ ID NO: 19983 - protein, 11 aa, synthetic construct
LGALSSAAPRA

SEQ ID NO: 19984 - protein, 10 aa, synthetic construct
LEGLGGRAQL

SEQ ID NO: 19985 - protein, 9 aa, synthetic construct
LLQDNALRA

SEQ ID NO: 19986 - protein, 10 aa, synthetic construct
QLAAEAAARL

SEQ ID NO: 19987 - protein, 9 aa, synthetic construct
LQLNGNLQL

SEQ ID NO: 19988 - protein, 10 aa, synthetic construct
AGLLDLNNAI

SEQ ID NO: 19989 - protein, 12 aa, synthetic construct
ALGLWQLGVGAD

SEQ ID NO: 19990 - protein, 11 aa, synthetic construct
VLVRTIDHLSR

SEQ ID NO: 19991 - protein, 9 aa, synthetic construct
LQMVTQGLV

SEQ ID NO: 19992 - protein, 9 aa, synthetic construct
LQKLLSKKP

SEQ ID NO: 19993 - protein, 8 aa, synthetic construct
IQLMKLLG

SEQ ID NO: 19994 - protein, 8 aa, synthetic construct
LQFLQGIL

SEQ ID NO: 19995 - protein, 9 aa, synthetic construct
ILQAGLRPI

SEQ ID NO: 19996 - protein, 11 aa, synthetic construct
NATVLKPEHSL

SEQ ID NO: 19997 - protein, 9 aa, synthetic construct
VEAIRLVTL

SEQ ID NO: 19998 - protein, 9 aa, synthetic construct
LEIPNVQLD

SEQ ID NO: 19999 - protein, 9 aa, synthetic construct
DILNPLDQL

SEQ ID NO: 20000 - protein, 10 aa, synthetic construct
KISGGPRISY

SEQ ID NO: 20001 - protein, 9 aa, synthetic construct
RGLALKEPL

SEQ ID NO: 20002 - protein, 9 aa, synthetic construct
TLQAGLAAD

SEQ ID NO: 20003 - protein, 9 aa, synthetic construct
ALGVTQILL

SEQ ID NO: 20004 - protein, 9 aa, synthetic construct
AVAVLGNLI

SEQ ID NO: 20005 - protein, 9 aa, synthetic construct
LQVHAGSAK

SEQ ID NO: 20006 - protein, 9 aa, synthetic construct
ALGVQTPSI

SEQ ID NO: 20007 - protein, 8 aa, synthetic construct
IQWVPTSL

SEQ ID NO: 20008 - protein, 9 aa, synthetic construct
LAGYADIFL

SEQ ID NO: 20009 - protein, 8 aa, synthetic construct
LQYLLLRH

SEQ ID NO: 20010 - protein, 9 aa, synthetic construct
LLSGFVPLL

SEQ ID NO: 20011 - protein, 9 aa, synthetic construct
TFSLGPPVV

SEQ ID NO: 20012 - protein, 10 aa, synthetic construct
IISAADRLEA

SEQ ID NO: 20013 - protein, 11 aa, synthetic construct
ALSMIIKSLKN

SEQ ID NO: 20014 - protein, 10 aa, synthetic construct
VVSLVMVALQ

SEQ ID NO: 20015 - protein, 10 aa, synthetic construct
KAQAIFLGNK

SEQ ID NO: 20016 - protein, 9 aa, synthetic construct
EILMKRNHL

SEQ ID NO: 20017 - protein, 9 aa, synthetic construct
ATKNRQLQG

SEQ ID NO: 20018 - protein, 9 aa, synthetic construct
TILLEELNA

SEQ ID NO: 20019 - protein, 9 aa, synthetic construct
ASFRIQSVM

SEQ ID NO: 20020 - protein, 9 aa, synthetic construct
FAWKVSAVM

SEQ ID NO: 20021 - protein, 10 aa, synthetic construct
HRLFVCISGV

SEQ ID NO: 20022 - protein, 9 aa, synthetic construct
LPVRAHVNI

SEQ ID NO: 20023 - protein, 10 aa, synthetic construct
RAVEIGVKKF

SEQ ID NO: 20024 - protein, 10 aa, synthetic construct
DILLKDKNRL

SEQ ID NO: 20025 - protein, 9 aa, synthetic construct
LIRKLPFQR

SEQ ID NO: 20026 - protein, 9 aa, synthetic construct
MKEAKKVVI

SEQ ID NO: 20027 - protein, 10 aa, synthetic construct
LLRDILQKAG

SEQ ID NO: 20028 - protein, 9 aa, synthetic construct
RLLAEGINR

SEQ ID NO: 20029 - protein, 10 aa, synthetic construct
ANVSTHIVAF

SEQ ID NO: 20030 - protein, 9 aa, synthetic construct
EKVVQRILY

SEQ ID NO: 20031 - protein, 10 aa, synthetic construct
AIRKELNEYK

SEQ ID NO: 20032 - protein, 9 aa, synthetic construct
HKSKLIAGK

SEQ ID NO: 20033 - protein, 9 aa, synthetic construct
WVTTPLFNF

SEQ ID NO: 20034 - protein, 10 aa, synthetic construct
RDALGQRYSL

SEQ ID NO: 20035 - protein, 8 aa, synthetic construct
LLPPRLQL

SEQ ID NO: 20036 - protein, 9 aa, synthetic construct
VILRPGRYI

SEQ ID NO: 20037 - protein, 9 aa, synthetic construct
LRDTVKRLQ

SEQ ID NO: 20038 - protein, 10 aa, synthetic construct
LVGIITAFNF

SEQ ID NO: 20039 - protein, 10 aa, synthetic construct
HGIPDLAQKL

SEQ ID NO: 20040 - protein, 10 aa, synthetic construct
HLKRSNSIHI

SEQ ID NO: 20041 - protein, 9 aa, synthetic construct
LLRLRSVRL

SEQ ID NO: 20042 - protein, 12 aa, synthetic construct
NAKAVVAALMKA

SEQ ID NO: 20043 - protein, 9 aa, synthetic construct
RLPSFILLK

SEQ ID NO: 20044 - protein, 9 aa, synthetic construct
FVTVRTPMK

SEQ ID NO: 20045 - protein, 8 aa, synthetic construct
YRLAPMRL

SEQ ID NO: 20046 - protein, 11 aa, synthetic construct
DRPPGPGAVGL

SEQ ID NO: 20047 - protein, 11 aa, synthetic construct
GHGGPALSARL

SEQ ID NO: 20048 - protein, 9 aa, synthetic construct
VRKDDPTLL

SEQ ID NO: 20049 - protein, 9 aa, synthetic construct
ISDLVLKEY

SEQ ID NO: 20050 - protein, 10 aa, synthetic construct
LSVQDKEAGY

SEQ ID NO: 20051 - protein, 8 aa, synthetic construct
LKEDILSY

SEQ ID NO: 20052 - protein, 9 aa, synthetic construct
GSVEILLSY

SEQ ID NO: 20053 - protein, 8 aa, synthetic construct
ISDIRYKE

SEQ ID NO: 20054 - protein, 8 aa, synthetic construct
LSLPNDSY

SEQ ID NO: 20055 - protein, 9 aa, synthetic construct
SIDSFIDSY

SEQ ID NO: 20056 - protein, 11 aa, synthetic construct
LDSLSSVSSAY

SEQ ID NO: 20057 - protein, 9 aa, synthetic construct
ESEVESLLY

SEQ ID NO: 20058 - protein, 8 aa, synthetic construct
SIDRYILL

SEQ ID NO: 20059 - protein, 13 aa, synthetic construct
SLEEPDAAAGLSS

SEQ ID NO: 20060 - protein, 10 aa, synthetic construct
ISEEMFYQLS

SEQ ID NO: 20061 - protein, 11 aa, synthetic construct
SLISTDSGNSL

SEQ ID NO: 20062 - protein, 9 aa, synthetic construct
LWKRETTVY

SEQ ID NO: 20063 - protein, 9 aa, synthetic construct
DSLGVLICY

SEQ ID NO: 20064 - protein, 10 aa, synthetic construct
IFHGNEEALY

SEQ ID NO: 20065 - protein, 9 aa, synthetic construct
LVSPTSEQY

SEQ ID NO: 20066 - protein, 9 aa, synthetic construct
ELSPSEKAY

SEQ ID NO: 20067 - protein, 9 aa, synthetic construct
LSSTLPLHK

SEQ ID NO: 20068 - protein, 10 aa, synthetic construct
YLQVHLQESL

SEQ ID NO: 20069 - protein, 10 aa, synthetic construct
SYLQSVEKYI

SEQ ID NO: 20070 - protein, 8 aa, synthetic construct
KEGLEWAG

SEQ ID NO: 20071 - protein, 10 aa, synthetic construct
LSGLQEKPDQ

SEQ ID NO: 20072 - protein, 9 aa, synthetic construct
KRSELIAKI

SEQ ID NO: 20073 - protein, 9 aa, synthetic construct
TVPYSSFSF

SEQ ID NO: 20074 - protein, 10 aa, synthetic construct
ILTVDGLTEG

SEQ ID NO: 20075 - protein, 10 aa, synthetic construct
SIIDVALSEA

SEQ ID NO: 20076 - protein, 9 aa, synthetic construct
SPTSILITW

SEQ ID NO: 20077 - protein, 10 aa, synthetic construct
LDAVSLLVMG

SEQ ID NO: 20078 - protein, 9 aa, synthetic construct
QPVTSLSLF

SEQ ID NO: 20079 - protein, 8 aa, synthetic construct
ILMESLEV

SEQ ID NO: 20080 - protein, 9 aa, synthetic construct
SALPFITYL

SEQ ID NO: 20081 - protein, 11 aa, synthetic construct
LLRSPSLPLSL

SEQ ID NO: 20082 - protein, 11 aa, synthetic construct
SLATAGGGNAV

SEQ ID NO: 20083 - protein, 8 aa, synthetic construct
LSQEEITL

SEQ ID NO: 20084 - protein, 8 aa, synthetic construct
ISELNETF

SEQ ID NO: 20085 - protein, 9 aa, synthetic construct
LSPTSGVPL

SEQ ID NO: 20086 - protein, 9 aa, synthetic construct
LSPRELTAL

SEQ ID NO: 20087 - protein, 8 aa, synthetic construct
LDGPKASI

SEQ ID NO: 20088 - protein, 10 aa, synthetic construct
SLGPEFGGAV

SEQ ID NO: 20089 - protein, 11 aa, synthetic construct
YSLYMFTTTQW

SEQ ID NO: 20090 - protein, 11 aa, synthetic construct
SYYLYMCDKVV

SEQ ID NO: 20091 - protein, 10 aa, synthetic construct
TLAVAAGLYY

SEQ ID NO: 20092 - protein, 8 aa, synthetic construct
TPTTIDEY

SEQ ID NO: 20093 - protein, 9 aa, synthetic construct
ISEEVDLYR

SEQ ID NO: 20094 - protein, 10 aa, synthetic construct
LTDDQAKYLG

SEQ ID NO: 20095 - protein, 10 aa, synthetic construct
TLDFHTNTLY

SEQ ID NO: 20096 - protein, 11 aa, synthetic construct
IGALQEVSEAY

SEQ ID NO: 20097 - protein, 10 aa, synthetic construct
YFERVGNSTI

SEQ ID NO: 20098 - protein, 10 aa, synthetic construct
LTNRMLSMGY

SEQ ID NO: 20099 - protein, 8 aa, synthetic construct
TIDTLKGV

SEQ ID NO: 20100 - protein, 10 aa, synthetic construct
TLDLNSKLAY

SEQ ID NO: 20101 - protein, 8 aa, synthetic construct
DTLLVRCE

SEQ ID NO: 20102 - protein, 10 aa, synthetic construct
SEILDSLSMG

SEQ ID NO: 20103 - protein, 9 aa, synthetic construct
YDTLISLME

SEQ ID NO: 20104 - protein, 9 aa, synthetic construct
ITDPANEKL

SEQ ID NO: 20105 - protein, 10 aa, synthetic construct
VAPAAEPDPV

SEQ ID NO: 20106 - protein, 8 aa, synthetic construct
LTDHQRTH

SEQ ID NO: 20107 - protein, 10 aa, synthetic construct
TIPEVQTFDS

SEQ ID NO: 20108 - protein, 10 aa, synthetic construct
ITNLTQGEEY

SEQ ID NO: 20109 - protein, 9 aa, synthetic construct
IIETANMSY

SEQ ID NO: 20110 - protein, 9 aa, synthetic construct
LKANKDSLY

SEQ ID NO: 20111 - protein, 9 aa, synthetic construct
TSSTPYLYY

SEQ ID NO: 20112 - protein, 8 aa, synthetic construct
TLSELDDI

SEQ ID NO: 20113 - protein, 10 aa, synthetic construct
LTNGDLRREM

SEQ ID NO: 20114 - protein, 10 aa, synthetic construct
PKVSVGAPDL

SEQ ID NO: 20115 - protein, 9 aa, synthetic construct
LAETKPQVP

SEQ ID NO: 20116 - protein, 9 aa, synthetic construct
DVTVPNLKP

SEQ ID NO: 20117 - protein, 9 aa, synthetic construct
EVTAEELEY

SEQ ID NO: 20118 - protein, 10 aa, synthetic construct
TVASLLKLYL

SEQ ID NO: 20119 - protein, 10 aa, synthetic construct
TELLEQNGGY

SEQ ID NO: 20120 - protein, 9 aa, synthetic construct
RSMMLENYQ

SEQ ID NO: 20121 - protein, 11 aa, synthetic construct
YAGLETCTVSS

SEQ ID NO: 20122 - protein, 9 aa, synthetic construct
TLDSIITEY

SEQ ID NO: 20123 - protein, 11 aa, synthetic construct
IDWTPSCPEPV

SEQ ID NO: 20124 - protein, 12 aa, synthetic construct
SQAEEEPSVEPV

SEQ ID NO: 20125 - protein, 9 aa, synthetic construct
LTNYLMQLL

SEQ ID NO: 20126 - protein, 8 aa, synthetic construct
TKQVINGI

SEQ ID NO: 20127 - protein, 10 aa, synthetic construct
LTGVPAALDL

SEQ ID NO: 20128 - protein, 8 aa, synthetic construct
LPEKMRPV

SEQ ID NO: 20129 - protein, 9 aa, synthetic construct
TLPPIEGTL

SEQ ID NO: 20130 - protein, 10 aa, synthetic construct
PTLTPPHPTL

SEQ ID NO: 20131 - protein, 9 aa, synthetic construct
IGEEQRKTI

SEQ ID NO: 20132 - protein, 10 aa, synthetic construct
ITPTPFVVEA

SEQ ID NO: 20133 - protein, 9 aa, synthetic construct
LDPEHTITI

SEQ ID NO: 20134 - protein, 10 aa, synthetic construct
LTVGTNGGLK

SEQ ID NO: 20135 - protein, 8 aa, synthetic construct
LTVQRETL

SEQ ID NO: 20136 - protein, 9 aa, synthetic construct
IVTLWNLTL

SEQ ID NO: 20137 - protein, 10 aa, synthetic construct
LTARALDSLL

SEQ ID NO: 20138 - protein, 11 aa, synthetic construct
ITVGSLIELQD

SEQ ID NO: 20139 - protein, 8 aa, synthetic construct
QNISLPEY

SEQ ID NO: 20140 - protein, 9 aa, synthetic construct
VLDGSELSY

SEQ ID NO: 20141 - protein, 9 aa, synthetic construct
GYDVSIPVY

SEQ ID NO: 20142 - protein, 10 aa, synthetic construct
VLFPKKGPGQ

SEQ ID NO: 20143 - protein, 9 aa, synthetic construct
VLLEEFSEY

SEQ ID NO: 20144 - protein, 9 aa, synthetic construct
LVLLASAAR

SEQ ID NO: 20145 - protein, 9 aa, synthetic construct
IVILAATGR

SEQ ID NO: 20146 - protein, 9 aa, synthetic construct
VLIKKPFLT

SEQ ID NO: 20147 - protein, 8 aa, synthetic construct
IVLGAIGL

SEQ ID NO: 20148 - protein, 8 aa, synthetic construct
LLVLLCHP

SEQ ID NO: 20149 - protein, 9 aa, synthetic construct
IVMVKNPAK

SEQ ID NO: 20150 - protein, 9 aa, synthetic construct
NVTVLFLSE

SEQ ID NO: 20151 - protein, 9 aa, synthetic construct
KADIVFLTD

SEQ ID NO: 20152 - protein, 9 aa, synthetic construct
IVPRSEVLV

SEQ ID NO: 20153 - protein, 12 aa, synthetic construct
PAGHGEPGIAVL

SEQ ID NO: 20154 - protein, 9 aa, synthetic construct
VRGRGRSSL

SEQ ID NO: 20155 - protein, 9 aa, synthetic construct
LPGRVTAIE

SEQ ID NO: 20156 - protein, 10 aa, synthetic construct
NALPSVLLEL

SEQ ID NO: 20157 - protein, 9 aa, synthetic construct
KEIRPALEL

SEQ ID NO: 20158 - protein, 10 aa, synthetic construct
VITDIAGVIP

SEQ ID NO: 20159 - protein, 10 aa, synthetic construct
LVTEDMPQLR

SEQ ID NO: 20160 - protein, 9 aa, synthetic construct
LLGIAFVVY

SEQ ID NO: 20161 - protein, 10 aa, synthetic construct
LVLPDPGKMK

SEQ ID NO: 20162 - protein, 9 aa, synthetic construct
LLGVSYTFD

SEQ ID NO: 20163 - protein, 9 aa, synthetic construct
VVSLAYAYE

SEQ ID NO: 20164 - protein, 9 aa, synthetic construct
KDLLADPQD

SEQ ID NO: 20165 - protein, 9 aa, synthetic construct
LGLYQAYQY

SEQ ID NO: 20166 - protein, 9 aa, synthetic construct
VLDKVTDLL

SEQ ID NO: 20167 - protein, 9 aa, synthetic construct
LVLSSRPFP

SEQ ID NO: 20168 - protein, 9 aa, synthetic construct
IGMTRIPVI

SEQ ID NO: 20169 - protein, 9 aa, synthetic construct
MGTRLPLVL

SEQ ID NO: 20170 - protein, 9 aa, synthetic construct
LVMLVRTAP

SEQ ID NO: 20171 - protein, 9 aa, synthetic construct
LWEDIPELP

SEQ ID NO: 20172 - protein, 9 aa, synthetic construct
LYWTLFSPA

SEQ ID NO: 20173 - protein, 10 aa, synthetic construct
IYDFNHKGVA

SEQ ID NO: 20174 - protein, 9 aa, synthetic construct
VNDWVSFYI

SEQ ID NO: 20175 - protein, 11 aa, synthetic construct
LYSLTMAMNGL

SEQ ID NO: 20176 - protein, 9 aa, synthetic construct
YIDELLTYI

SEQ ID NO: 20177 - protein, 9 aa, synthetic construct
LYDLDVNIF

SEQ ID NO: 20178 - protein, 9 aa, synthetic construct
LYDLKQNSF

SEQ ID NO: 20179 - protein, 9 aa, synthetic construct
FEYCTPVMV

SEQ ID NO: 20180 - protein, 8 aa, synthetic construct
LYQKQPKI

SEQ ID NO: 20181 - protein, 8 aa, synthetic construct
IYQVQKKY

SEQ ID NO: 20182 - protein, 10 aa, synthetic construct
MVSNSVGNTT

SEQ ID NO: 20183 - protein, 9 aa, synthetic construct
IYFHQYTHK

SEQ ID NO: 20184 - protein, 11 aa, synthetic construct
LYGREGLSNEV

SEQ ID NO: 20185 - protein, 12 aa, synthetic construct
IYSSSSRPSGVP

SEQ ID NO: 20186 - protein, 10 aa, synthetic construct
LYIVYIALPG

SEQ ID NO: 20187 - protein, 10 aa, synthetic construct
LYSSLKLLPF

SEQ ID NO: 20188 - protein, 8 aa, synthetic construct
YLNKAKWL

SEQ ID NO: 20189 - protein, 10 aa, synthetic construct
LYPLLPISGR

SEQ ID NO: 20190 - protein, 9 aa, synthetic construct
LVSMLLPVF

SEQ ID NO: 20191 - protein, 11 aa, synthetic construct
YLLVCLGDSGV

SEQ ID NO: 20192 - protein, 11 aa, synthetic construct
LYSAAMNSELI

SEQ ID NO: 20193 - protein, 13 aa, synthetic construct
YLQPNPGDALLDA

SEQ ID NO: 20194 - protein, 10 aa, synthetic construct
PSTGRLERFP

SEQ ID NO: 20195 - protein, 9 aa, synthetic construct
LYHSQFTYF

SEQ ID NO: 20196 - protein, 11 aa, synthetic construct
LYDALFSSQSP

SEQ ID NO: 20197 - protein, 11 aa, synthetic construct
MLPSSIGLPSI

SEQ ID NO: 20198 - protein, 8 aa, synthetic construct
MSLVSGPL

SEQ ID NO: 20199 - protein, 8 aa, synthetic construct
MIGIGSLP

SEQ ID NO: 20200 - protein, 8 aa, synthetic construct
FPSVSGIP

SEQ ID NO: 20201 - protein, 8 aa, synthetic construct
ILRKSCMI

SEQ ID NO: 20202 - protein, 8 aa, synthetic construct
ILMEHIHK

SEQ ID NO: 20203 - protein, 8 aa, synthetic construct
MLAYHLKL

SEQ ID NO: 20204 - protein, 8 aa, synthetic construct
MIFHSILK

SEQ ID NO: 20205 - protein, 9 aa, synthetic construct
LMKKFKEIQ

SEQ ID NO: 20206 - protein, 10 aa, synthetic construct
LMLGLDAAGK

SEQ ID NO: 20207 - protein, 8 aa, synthetic construct
LMPLVMLL

SEQ ID NO: 20208 - protein, 9 aa, synthetic construct
LLMTDVLVF

SEQ ID NO: 20209 - protein, 12 aa, synthetic construct
GGQVSPGAGTEV

SEQ ID NO: 20210 - protein, 10 aa, synthetic construct
SPTSNSSATI

SEQ ID NO: 20211 - protein, 9 aa, synthetic construct
GLDLSMEAL

SEQ ID NO: 20212 - protein, 9 aa, synthetic construct
TPSTPFSDL

SEQ ID NO: 20213 - protein, 9 aa, synthetic construct
LGMQAACTL

SEQ ID NO: 20214 - protein, 10 aa, synthetic construct
AVDGVMNGEY

SEQ ID NO: 20215 - protein, 8 aa, synthetic construct
CIMVFDVQ

SEQ ID NO: 20216 - protein, 9 aa, synthetic construct
LCMMTAGLV

SEQ ID NO: 20217 - protein, 9 aa, synthetic construct
SEPAFILLL

SEQ ID NO: 20218 - protein, 9 aa, synthetic construct
QSTLPSLFF

SEQ ID NO: 20219 - protein, 8 aa, synthetic construct
FPAVGMQL

SEQ ID NO: 20220 - protein, 10 aa, synthetic construct
LALDMEIATY

SEQ ID NO: 20221 - protein, 10 aa, synthetic construct
LQAPSGNTVP

SEQ ID NO: 20222 - protein, 11 aa, synthetic construct
GFGAPLPSSSQ

SEQ ID NO: 20223 - protein, 10 aa, synthetic construct
FSGSSPAPPS

SEQ ID NO: 20224 - protein, 9 aa, synthetic construct
LEFLSSESP

SEQ ID NO: 20225 - protein, 9 aa, synthetic construct
MGPISLAWI

SEQ ID NO: 20226 - protein, 11 aa, synthetic construct
MAKIERFSYGQ

SEQ ID NO: 20227 - protein, 9 aa, synthetic construct
NGMIGEVVM

SEQ ID NO: 20228 - protein, 9 aa, synthetic construct
MGIMVEFSV

SEQ ID NO: 20229 - protein, 10 aa, synthetic construct
MAWLCGSLPV

SEQ ID NO: 20230 - protein, 9 aa, synthetic construct
SDNKILPAA

SEQ ID NO: 20231 - protein, 9 aa, synthetic construct
MEDSVFKVA

SEQ ID NO: 20232 - protein, 9 aa, synthetic construct
EMVQMAVEA

SEQ ID NO: 20233 - protein, 8 aa, synthetic construct
LEQFEMAL

SEQ ID NO: 20234 - protein, 10 aa, synthetic construct
MASVRFMVTP

SEQ ID NO: 20235 - protein, 11 aa, synthetic construct
SGSLMAEEYTV

SEQ ID NO: 20236 - protein, 9 aa, synthetic construct
EMLKRNIGV

SEQ ID NO: 20237 - protein, 9 aa, synthetic construct
MALGQEMIP

SEQ ID NO: 20238 - protein, 9 aa, synthetic construct
LTYEPAWPL

SEQ ID NO: 20239 - protein, 10 aa, synthetic construct
LEFNMLAQGC

SEQ ID NO: 20240 - protein, 9 aa, synthetic construct
MDFILSHAV

SEQ ID NO: 20241 - protein, 11 aa, synthetic construct
YVQQATFKSSV

SEQ ID NO: 20242 - protein, 7 aa, synthetic construct
MYQVILK

SEQ ID NO: 20243 - protein, 9 aa, synthetic construct
PYVQCGMEH

SEQ ID NO: 20244 - protein, 9 aa, synthetic construct
LISKYPSET

SEQ ID NO: 20245 - protein, 9 aa, synthetic construct
FPENKKQPY

SEQ ID NO: 20246 - protein, 9 aa, synthetic construct
ENTERTTEF

SEQ ID NO: 20247 - protein, 9 aa, synthetic construct
MAENLLMVA

SEQ ID NO: 20248 - protein, 11 aa, synthetic construct
FPDLPGGPLGP

SEQ ID NO: 20249 - protein, 8 aa, synthetic construct
TPMMNIIP

SEQ ID NO: 20250 - protein, 7 aa, synthetic construct
MLLQTIK

SEQ ID NO: 20251 - protein, 8 aa, synthetic construct
CVAPGVIY

SEQ ID NO: 20252 - protein, 10 aa, synthetic construct
GLEQICPGAF

SEQ ID NO: 20253 - protein, 9 aa, synthetic construct
MIAAPDTII

SEQ ID NO: 20254 - protein, 9 aa, synthetic construct
FQEEGMLSM

SEQ ID NO: 20255 - protein, 9 aa, synthetic construct
SPPSSLMTY

SEQ ID NO: 20256 - protein, 9 aa, synthetic construct
FEETKHFPM

SEQ ID NO: 20257 - protein, 8 aa, synthetic construct
TYLCYSLL

SEQ ID NO: 20258 - protein, 10 aa, synthetic construct
KDGSPGPVSY

SEQ ID NO: 20259 - protein, 8 aa, synthetic construct
MQGEDWEF

SEQ ID NO: 20260 - protein, 10 aa, synthetic construct
EVTMTATTEV

SEQ ID NO: 20261 - protein, 9 aa, synthetic construct
REDNGLTLT

SEQ ID NO: 20262 - protein, 10 aa, synthetic construct
MNDGVYGSFA

SEQ ID NO: 20263 - protein, 10 aa, synthetic construct
MSNGTLHHYF

SEQ ID NO: 20264 - protein, 11 aa, synthetic construct
MDPPRPCMPPS

SEQ ID NO: 20265 - protein, 9 aa, synthetic construct
QMTTEVPVL

SEQ ID NO: 20266 - protein, 9 aa, synthetic construct
DQNIDVEAL

SEQ ID NO: 20267 - protein, 10 aa, synthetic construct
MPEIMQEVRC

SEQ ID NO: 20268 - protein, 9 aa, synthetic construct
MMLEVQGAF

SEQ ID NO: 20269 - protein, 11 aa, synthetic construct
MKIQSGAWVCY

SEQ ID NO: 20270 - protein, 10 aa, synthetic construct
MGAEFFLLGL

SEQ ID NO: 20271 - protein, 9 aa, synthetic construct
MPTPARSLF

SEQ ID NO: 20272 - protein, 11 aa, synthetic construct
MASINRTIEIM

SEQ ID NO: 20273 - protein, 10 aa, synthetic construct
AGIAAMMLSA

SEQ ID NO: 20274 - protein, 9 aa, synthetic construct
MLCIAGVSA

SEQ ID NO: 20275 - protein, 9 aa, synthetic construct
MPFDVQRSP

SEQ ID NO: 20276 - protein, 9 aa, synthetic construct
MLSVDTTEL

SEQ ID NO: 20277 - protein, 9 aa, synthetic construct
QSVINYVEE

SEQ ID NO: 20278 - protein, 10 aa, synthetic construct
QDCLLSGAPM

SEQ ID NO: 20279 - protein, 10 aa, synthetic construct
MGVPPDSPQM

SEQ ID NO: 20280 - protein, 9 aa, synthetic construct
LMPHDLITQ

SEQ ID NO: 20281 - protein, 11 aa, synthetic construct
DSSFEAMVTAL

SEQ ID NO: 20282 - protein, 9 aa, synthetic construct
MLPETTRED

SEQ ID NO: 20283 - protein, 9 aa, synthetic construct
RGQPSSPSL

SEQ ID NO: 20284 - protein, 10 aa, synthetic construct
MPIGSHLNTF

SEQ ID NO: 20285 - protein, 11 aa, synthetic construct
MPKAPKGKSAG

SEQ ID NO: 20286 - protein, 9 aa, synthetic construct
FQSCAKAVM

SEQ ID NO: 20287 - protein, 12 aa, synthetic construct
GGPGPAGPMGPF

SEQ ID NO: 20288 - protein, 9 aa, synthetic construct
MPLLGLVMK

SEQ ID NO: 20289 - protein, 10 aa, synthetic construct
FPPAPRGGFA

SEQ ID NO: 20290 - protein, 9 aa, synthetic construct
LMPNENIPE

SEQ ID NO: 20291 - protein, 9 aa, synthetic construct
MDLFMALQI

SEQ ID NO: 20292 - protein, 9 aa, synthetic construct
MVPNVGLKF

SEQ ID NO: 20293 - protein, 9 aa, synthetic construct
VYEFQTPSY

SEQ ID NO: 20294 - protein, 8 aa, synthetic construct
MDDRRLMY

SEQ ID NO: 20295 - protein, 12 aa, synthetic construct
ILETKEASMMEY

SEQ ID NO: 20296 - protein, 7 aa, synthetic construct
QISWEVY

SEQ ID NO: 20297 - protein, 10 aa, synthetic construct
MPSPVLGLAA

SEQ ID NO: 20298 - protein, 8 aa, synthetic construct
VCIWMETF

SEQ ID NO: 20299 - protein, 9 aa, synthetic construct
CLLEENFDF

SEQ ID NO: 20300 - protein, 8 aa, synthetic construct
MEKLLNVF

SEQ ID NO: 20301 - protein, 11 aa, synthetic construct
TNGGGSAFSDY

SEQ ID NO: 20302 - protein, 8 aa, synthetic construct
LDEWIEVT

SEQ ID NO: 20303 - protein, 9 aa, synthetic construct
MPAPSSWTF

SEQ ID NO: 20304 - protein, 11 aa, synthetic construct
YPTPSSSYFGG

SEQ ID NO: 20305 - protein, 8 aa, synthetic construct
MPVRRSWL

SEQ ID NO: 20306 - protein, 8 aa, synthetic construct
PGRGNPQM

SEQ ID NO: 20307 - protein, 10 aa, synthetic construct
MPVPELYNRI

SEQ ID NO: 20308 - protein, 10 aa, synthetic construct
PSAGKEQSVL

SEQ ID NO: 20309 - protein, 10 aa, synthetic construct
MPVTTNQNFY

SEQ ID NO: 20310 - protein, 9 aa, synthetic construct
PETLLGEME

SEQ ID NO: 20311 - protein, 11 aa, synthetic construct
MENGLVSLHAY

SEQ ID NO: 20312 - protein, 11 aa, synthetic construct
ANSVVSDMMVS

SEQ ID NO: 20313 - protein, 10 aa, synthetic construct
DYTTDNMSIY

SEQ ID NO: 20314 - protein, 9 aa, synthetic construct
MAMKSTLLL

SEQ ID NO: 20315 - protein, 9 aa, synthetic construct
QQRNISATV

SEQ ID NO: 20316 - protein, 8 aa, synthetic construct
MQLIFSLK

SEQ ID NO: 20317 - protein, 8 aa, synthetic construct
VCIMVRLL

SEQ ID NO: 20318 - protein, 8 aa, synthetic construct
FPQRLHQL

SEQ ID NO: 20319 - protein, 9 aa, synthetic construct
VCAGILLSR

SEQ ID NO: 20320 - protein, 9 aa, synthetic construct
MFQPLDGLK

SEQ ID NO: 20321 - protein, 10 aa, synthetic construct
QVPLTPATFL

SEQ ID NO: 20322 - protein, 9 aa, synthetic construct
ATLLQMFGL

SEQ ID NO: 20323 - protein, 11 aa, synthetic construct
SPSGSLLKVFG

SEQ ID NO: 20324 - protein, 9 aa, synthetic construct
QKTSRLPII

SEQ ID NO: 20325 - protein, 9 aa, synthetic construct
PRLHPPLLL

SEQ ID NO: 20326 - protein, 11 aa, synthetic construct
TAGGRVRLLLL

SEQ ID NO: 20327 - protein, 12 aa, synthetic construct
GGGGTVRLLLIL

SEQ ID NO: 20328 - protein, 8 aa, synthetic construct
REMRDLLM

SEQ ID NO: 20329 - protein, 9 aa, synthetic construct
AMTDLPTEM

SEQ ID NO: 20330 - protein, 9 aa, synthetic construct
MSMARPQLS

SEQ ID NO: 20331 - protein, 9 aa, synthetic construct
LMKEDEDAY

SEQ ID NO: 20332 - protein, 10 aa, synthetic construct
ITSIHIENWR

SEQ ID NO: 20333 - protein, 10 aa, synthetic construct
TMNLGLTGPF

SEQ ID NO: 20334 - protein, 9 aa, synthetic construct
NTRHLERIY

SEQ ID NO: 20335 - protein, 9 aa, synthetic construct
SMPTNKWNY

SEQ ID NO: 20336 - protein, 9 aa, synthetic construct
AVVPAAMVS

SEQ ID NO: 20337 - protein, 7 aa, synthetic construct
VMHFLHY

SEQ ID NO: 20338 - protein, 9 aa, synthetic construct
MVIKCIILY

SEQ ID NO: 20339 - protein, 10 aa, synthetic construct
MVVEVVAAEV

SEQ ID NO: 20340 - protein, 10 aa, synthetic construct
MVVMEVNSEF

SEQ ID NO: 20341 - protein, 8 aa, synthetic construct
MMYCKEKI

SEQ ID NO: 20342 - protein, 10 aa, synthetic construct
ARNLNPSSLY

SEQ ID NO: 20343 - protein, 9 aa, synthetic construct
QQFYKSGVG

SEQ ID NO: 20344 - protein, 8 aa, synthetic construct
HMPCLGHT

SEQ ID NO: 20345 - protein, 10 aa, synthetic construct
INPDLSIAQQ

SEQ ID NO: 20346 - protein, 13 aa, synthetic construct
GAGAGVASGPELL

SEQ ID NO: 20347 - protein, 9 aa, synthetic construct
QAGPPYPVT

SEQ ID NO: 20348 - protein, 10 aa, synthetic construct
MAASNLSVNY

SEQ ID NO: 20349 - protein, 9 aa, synthetic construct
AQGYPAYTT

SEQ ID NO: 20350 - protein, 8 aa, synthetic construct
YGVYNVTM

SEQ ID NO: 20351 - protein, 9 aa, synthetic construct
VFNNGTLYF

SEQ ID NO: 20352 - protein, 10 aa, synthetic construct
NAENKLYLAE

SEQ ID NO: 20353 - protein, 8 aa, synthetic construct
TVKNMLLF

SEQ ID NO: 20354 - protein, 9 aa, synthetic construct
SGLQGFLIF

SEQ ID NO: 20355 - protein, 8 aa, synthetic construct
ANAFTLTP

SEQ ID NO: 20356 - protein, 9 aa, synthetic construct
LNAFDIAEE

SEQ ID NO: 20357 - protein, 10 aa, synthetic construct
AAAGEFAFAY

SEQ ID NO: 20358 - protein, 9 aa, synthetic construct
FNEAELFVA

SEQ ID NO: 20359 - protein, 11 aa, synthetic construct
QSCQVAADETY

SEQ ID NO: 20360 - protein, 11 aa, synthetic construct
YGGPSVFSVTG

SEQ ID NO: 20361 - protein, 10 aa, synthetic construct
ANIGFSTLTM

SEQ ID NO: 20362 - protein, 10 aa, synthetic construct
NIQFGDNGTT

SEQ ID NO: 20363 - protein, 10 aa, synthetic construct
NAFSENRQDY

SEQ ID NO: 20364 - protein, 11 aa, synthetic construct
GQFYAFSNFYY

SEQ ID NO: 20365 - protein, 8 aa, synthetic construct
EKCSTMIE

SEQ ID NO: 20366 - protein, 8 aa, synthetic construct
GEQGDPGL

SEQ ID NO: 20367 - protein, 8 aa, synthetic construct
ENQDPLGA

SEQ ID NO: 20368 - protein, 11 aa, synthetic construct
GGGAEDALGPR

SEQ ID NO: 20369 - protein, 10 aa, synthetic construct
GGAIEIPMDP

SEQ ID NO: 20370 - protein, 9 aa, synthetic construct
LPNAQLVFS

SEQ ID NO: 20371 - protein, 8 aa, synthetic construct
ENLLANVY

SEQ ID NO: 20372 - protein, 9 aa, synthetic construct
QGGLRGVRL

SEQ ID NO: 20373 - protein, 9 aa, synthetic construct
DAWEPLTSF

SEQ ID NO: 20374 - protein, 9 aa, synthetic construct
MGFVINAIY

SEQ ID NO: 20375 - protein, 9 aa, synthetic construct
QEVAAVDFE

SEQ ID NO: 20376 - protein, 8 aa, synthetic construct
NAIKYTKN

SEQ ID NO: 20377 - protein, 10 aa, synthetic construct
QGLQCRSATM

SEQ ID NO: 20378 - protein, 12 aa, synthetic construct
MKATGAAPGTAF

SEQ ID NO: 20379 - protein, 9 aa, synthetic construct
TGLEKGTSY

SEQ ID NO: 20380 - protein, 9 aa, synthetic construct
AVQSLTSSY

SEQ ID NO: 20381 - protein, 11 aa, synthetic construct
QAVTLADGSTA

SEQ ID NO: 20382 - protein, 9 aa, synthetic construct
AVQVGLLSY

SEQ ID NO: 20383 - protein, 10 aa, synthetic construct
ATSAPQAVLY

SEQ ID NO: 20384 - protein, 10 aa, synthetic construct
NALFQSSNLG

SEQ ID NO: 20385 - protein, 8 aa, synthetic construct
CPRLNSVL

SEQ ID NO: 20386 - protein, 8 aa, synthetic construct
CLVLNQGY

SEQ ID NO: 20387 - protein, 10 aa, synthetic construct
NALHLENYVF

SEQ ID NO: 20388 - protein, 10 aa, synthetic construct
ALGGILAPIY

SEQ ID NO: 20389 - protein, 10 aa, synthetic construct
GALQGEMSAL

SEQ ID NO: 20390 - protein, 9 aa, synthetic construct
INGTSPFAY

SEQ ID NO: 20391 - protein, 8 aa, synthetic construct
EPDKDLKY

SEQ ID NO: 20392 - protein, 9 aa, synthetic construct
NAYPRNIQI

SEQ ID NO: 20393 - protein, 8 aa, synthetic construct
VIQECVQF

SEQ ID NO: 20394 - protein, 8 aa, synthetic construct
EMHWPVPM

SEQ ID NO: 20395 - protein, 11 aa, synthetic construct
GAVAGGLIQDL

SEQ ID NO: 20396 - protein, 10 aa, synthetic construct
LAGVANQLLD

SEQ ID NO: 20397 - protein, 10 aa, synthetic construct
LAGANVLLQD

SEQ ID NO: 20398 - protein, 7 aa, synthetic construct
RHMISFL

SEQ ID NO: 20399 - protein, 9 aa, synthetic construct
QGLPLHVAT

SEQ ID NO: 20400 - protein, 8 aa, synthetic construct
NAPQMLTI

SEQ ID NO: 20401 - protein, 10 aa, synthetic construct
GGASSVPLSV

SEQ ID NO: 20402 - protein, 9 aa, synthetic construct
QGSLGPEEF

SEQ ID NO: 20403 - protein, 8 aa, synthetic construct
LNQSAMLF

SEQ ID NO: 20404 - protein, 10 aa, synthetic construct
QSTGPLIDMS

SEQ ID NO: 20405 - protein, 9 aa, synthetic construct
LDNGQVGLY

SEQ ID NO: 20406 - protein, 9 aa, synthetic construct
LQGQVLEFQ

SEQ ID NO: 20407 - protein, 9 aa, synthetic construct
LQGQVSELP

SEQ ID NO: 20408 - protein, 9 aa, synthetic construct
WRDGQVPLY

SEQ ID NO: 20409 - protein, 10 aa, synthetic construct
AAAGLTVALM

SEQ ID NO: 20410 - protein, 9 aa, synthetic construct
EQRSGDITY

SEQ ID NO: 20411 - protein, 9 aa, synthetic construct
EVAAFSNGY

SEQ ID NO: 20412 - protein, 10 aa, synthetic construct
VQQTTMTHVY

SEQ ID NO: 20413 - protein, 11 aa, synthetic construct
QGYQEGNINQK

SEQ ID NO: 20414 - protein, 9 aa, synthetic construct
QYGVATVII

SEQ ID NO: 20415 - protein, 8 aa, synthetic construct
PQQYEVQF

SEQ ID NO: 20416 - protein, 12 aa, synthetic construct
CGGGTKGVAVPV

SEQ ID NO: 20417 - protein, 9 aa, synthetic construct
NCAVQSMEM

SEQ ID NO: 20418 - protein, 10 aa, synthetic construct
GGCPPSQRLS

SEQ ID NO: 20419 - protein, 9 aa, synthetic construct
NCKKNLEPI

SEQ ID NO: 20420 - protein, 10 aa, synthetic construct
DNKEDANKPI

SEQ ID NO: 20421 - protein, 13 aa, synthetic construct
EFTSSAEGSGEQL

SEQ ID NO: 20422 - protein, 11 aa, synthetic construct
LNCFAGDLEQL

SEQ ID NO: 20423 - protein, 10 aa, synthetic construct
CLIENFNEQL

SEQ ID NO: 20424 - protein, 11 aa, synthetic construct
DCPGVNFEYQL

SEQ ID NO: 20425 - protein, 11 aa, synthetic construct
LDIDYMGEEQL

SEQ ID NO: 20426 - protein, 9 aa, synthetic construct
QVKEKVLDQ

SEQ ID NO: 20427 - protein, 11 aa, synthetic construct
QNLEDLMPSRP

SEQ ID NO: 20428 - protein, 10 aa, synthetic construct
NELSGALTGL

SEQ ID NO: 20429 - protein, 11 aa, synthetic construct
NADASPTTGLF

SEQ ID NO: 20430 - protein, 8 aa, synthetic construct
ENREKDLL

SEQ ID NO: 20431 - protein, 9 aa, synthetic construct
ANEYAGFLM

SEQ ID NO: 20432 - protein, 10 aa, synthetic construct
QDYVVGFTDL

SEQ ID NO: 20433 - protein, 10 aa, synthetic construct
ADYMASTIGR

SEQ ID NO: 20434 - protein, 10 aa, synthetic construct
YACGDCGKAF

SEQ ID NO: 20435 - protein, 10 aa, synthetic construct
NFDNSPVLQE

SEQ ID NO: 20436 - protein, 12 aa, synthetic construct
NFTGLIAGVVSI

SEQ ID NO: 20437 - protein, 10 aa, synthetic construct
DFNNLTAAAF

SEQ ID NO: 20438 - protein, 8 aa, synthetic construct
LQYEMSTF

SEQ ID NO: 20439 - protein, 9 aa, synthetic construct
LDFQSFQNE

SEQ ID NO: 20440 - protein, 10 aa, synthetic construct
KGEKNSVDWG

SEQ ID NO: 20441 - protein, 11 aa, synthetic construct
ADNFVFDGSSL

SEQ ID NO: 20442 - protein, 10 aa, synthetic construct
GPGQPASTCV

SEQ ID NO: 20443 - protein, 10 aa, synthetic construct
NFIQNFYLPQ

SEQ ID NO: 20444 - protein, 11 aa, synthetic construct
GFGFWPAKVMQ

SEQ ID NO: 20445 - protein, 11 aa, synthetic construct
NFYEKPAFDYP

SEQ ID NO: 20446 - protein, 9 aa, synthetic construct
EGTQEDLEY

SEQ ID NO: 20447 - protein, 9 aa, synthetic construct
VPPLGFGWN

SEQ ID NO: 20448 - protein, 9 aa, synthetic construct
NGVRFLKSI

SEQ ID NO: 20449 - protein, 10 aa, synthetic construct
KGMGLVNHVF

SEQ ID NO: 20450 - protein, 9 aa, synthetic construct
IHNLAQMKF

SEQ ID NO: 20451 - protein, 10 aa, synthetic construct
NHITLSFTHF

SEQ ID NO: 20452 - protein, 8 aa, synthetic construct
ELNIEDYF

SEQ ID NO: 20453 - protein, 9 aa, synthetic construct
QVFPIAPSF

SEQ ID NO: 20454 - protein, 9 aa, synthetic construct
IEQLTLKLN

SEQ ID NO: 20455 - protein, 9 aa, synthetic construct
NLKEKIFIS

SEQ ID NO: 20456 - protein, 8 aa, synthetic construct
NIKNVVLR

SEQ ID NO: 20457 - protein, 9 aa, synthetic construct
NIIMDTSTF

SEQ ID NO: 20458 - protein, 9 aa, synthetic construct
LNLPEAASY

SEQ ID NO: 20459 - protein, 9 aa, synthetic construct
INPELVGLY

SEQ ID NO: 20460 - protein, 10 aa, synthetic construct
VQPGTVALVR

SEQ ID NO: 20461 - protein, 10 aa, synthetic construct
LGGREALEEL

SEQ ID NO: 20462 - protein, 14 aa, synthetic construct
GGLAGSGGLPLNGL

SEQ ID NO: 20463 - protein, 11 aa, synthetic construct
NGLWSRISHLV

SEQ ID NO: 20464 - protein, 12 aa, synthetic construct
RAKGAMGLEHIV

SEQ ID NO: 20465 - protein, 12 aa, synthetic construct
NLVITGNNQPIV

SEQ ID NO: 20466 - protein, 9 aa, synthetic construct
LQRVEELYD

SEQ ID NO: 20467 - protein, 10 aa, synthetic construct
NIIKGLQQTI

SEQ ID NO: 20468 - protein, 8 aa, synthetic construct
IWDLILKY

SEQ ID NO: 20469 - protein, 9 aa, synthetic construct
EITSIPLYK

SEQ ID NO: 20470 - protein, 10 aa, synthetic construct
ISVDGAKVII

SEQ ID NO: 20471 - protein, 9 aa, synthetic construct
NKESSRVFL

SEQ ID NO: 20472 - protein, 10 aa, synthetic construct
NIAETSLTIE

SEQ ID NO: 20473 - protein, 9 aa, synthetic construct
EAVEQLEGV

SEQ ID NO: 20474 - protein, 10 aa, synthetic construct
GGIAEKDGRL

SEQ ID NO: 20475 - protein, 8 aa, synthetic construct
VQAERAWR

SEQ ID NO: 20476 - protein, 13 aa, synthetic construct
GAVAKGSPKPSPQ

SEQ ID NO: 20477 - protein, 9 aa, synthetic construct
NIIRQLSSL

SEQ ID NO: 20478 - protein, 9 aa, synthetic construct
MGLERLVSV

SEQ ID NO: 20479 - protein, 10 aa, synthetic construct
LNASFLASPT

SEQ ID NO: 20480 - protein, 8 aa, synthetic construct
VQCPRLPG

SEQ ID NO: 20481 - protein, 9 aa, synthetic construct
VAGCYLKYK

SEQ ID NO: 20482 - protein, 9 aa, synthetic construct
DQVLLDAEY

SEQ ID NO: 20483 - protein, 10 aa, synthetic construct
TASHTNKSGY

SEQ ID NO: 20484 - protein, 9 aa, synthetic construct
NLEKNNNKY

SEQ ID NO: 20485 - protein, 8 aa, synthetic construct
DMRQTVAV

SEQ ID NO: 20486 - protein, 10 aa, synthetic construct
NLFEALVGTL

SEQ ID NO: 20487 - protein, 11 aa, synthetic construct
VAGFEVQSLQD

SEQ ID NO: 20488 - protein, 10 aa, synthetic construct
NLAFVDALLS

SEQ ID NO: 20489 - protein, 10 aa, synthetic construct
LNRMGKGSLS

SEQ ID NO: 20490 - protein, 9 aa, synthetic construct
LNILFENIS

SEQ ID NO: 20491 - protein, 10 aa, synthetic construct
LNLAVADFLS

SEQ ID NO: 20492 - protein, 8 aa, synthetic construct
LNLKKSLL

SEQ ID NO: 20493 - protein, 8 aa, synthetic construct
NLTKLKVL

SEQ ID NO: 20494 - protein, 8 aa, synthetic construct
VQIVTKKI

SEQ ID NO: 20495 - protein, 9 aa, synthetic construct
INKFVNSVI

SEQ ID NO: 20496 - protein, 8 aa, synthetic construct
INKIKLVA

SEQ ID NO: 20497 - protein, 8 aa, synthetic construct
VQLKKIHS

SEQ ID NO: 20498 - protein, 9 aa, synthetic construct
KNLLIKHSF

SEQ ID NO: 20499 - protein, 10 aa, synthetic construct
NIKINGSVRL

SEQ ID NO: 20500 - protein, 9 aa, synthetic construct
NIRYLIKFL

SEQ ID NO: 20501 - protein, 9 aa, synthetic construct
NLKAKDRTF

SEQ ID NO: 20502 - protein, 8 aa, synthetic construct
LNKQKVTF

SEQ ID NO: 20503 - protein, 9 aa, synthetic construct
NLVKRNSEL

SEQ ID NO: 20504 - protein, 8 aa, synthetic construct
ARKKVVLF

SEQ ID NO: 20505 - protein, 9 aa, synthetic construct
IDLINISLE

SEQ ID NO: 20506 - protein, 9 aa, synthetic construct
QVIQEGGED

SEQ ID NO: 20507 - protein, 9 aa, synthetic construct
KMKKKLLNI

SEQ ID NO: 20508 - protein, 9 aa, synthetic construct
NIIKGKVKF

SEQ ID NO: 20509 - protein, 9 aa, synthetic construct
QVQGVGSKG

SEQ ID NO: 20510 - protein, 10 aa, synthetic construct
ARMNDLHYLN

SEQ ID NO: 20511 - protein, 9 aa, synthetic construct
SSMNWGINL

SEQ ID NO: 20512 - protein, 8 aa, synthetic construct
ERWPEDNI

SEQ ID NO: 20513 - protein, 9 aa, synthetic construct
LETKNALNI

SEQ ID NO: 20514 - protein, 9 aa, synthetic construct
LNPIFGEIL

SEQ ID NO: 20515 - protein, 8 aa, synthetic construct
LNPVRNKI

SEQ ID NO: 20516 - protein, 9 aa, synthetic construct
NIGTSPGSL

SEQ ID NO: 20517 - protein, 9 aa, synthetic construct
QVQLDPQAL

SEQ ID NO: 20518 - protein, 11 aa, synthetic construct
ANGLLNAPSLG

SEQ ID NO: 20519 - protein, 9 aa, synthetic construct
VQIQDSLPQ

SEQ ID NO: 20520 - protein, 9 aa, synthetic construct
QVEVQPSLQ

SEQ ID NO: 20521 - protein, 9 aa, synthetic construct
KHRQVLLEI

SEQ ID NO: 20522 - protein, 10 aa, synthetic construct
LNLTTDNANI

SEQ ID NO: 20523 - protein, 10 aa, synthetic construct
IGGTEEWAIL

SEQ ID NO: 20524 - protein, 10 aa, synthetic construct
TDSQLQGQVL

SEQ ID NO: 20525 - protein, 8 aa, synthetic construct
LMNIKLAL

SEQ ID NO: 20526 - protein, 8 aa, synthetic construct
MNHKILVC

SEQ ID NO: 20527 - protein, 8 aa, synthetic construct
NMYVKKVE

SEQ ID NO: 20528 - protein, 11 aa, synthetic construct
GDSGKVDPVYE

SEQ ID NO: 20529 - protein, 9 aa, synthetic construct
GGRLLSVLL

SEQ ID NO: 20530 - protein, 9 aa, synthetic construct
QVEVNGAVF

SEQ ID NO: 20531 - protein, 10 aa, synthetic construct
YQYPYPSPVS

SEQ ID NO: 20532 - protein, 10 aa, synthetic construct
QMYKLCSEQL

SEQ ID NO: 20533 - protein, 11 aa, synthetic construct
SSVQMVMMEQL

SEQ ID NO: 20534 - protein, 12 aa, synthetic construct
VNPGQGEGEEQI

SEQ ID NO: 20535 - protein, 9 aa, synthetic construct
LNPEGSLFL

SEQ ID NO: 20536 - protein, 9 aa, synthetic construct
YFSMRKNNN

SEQ ID NO: 20537 - protein, 10 aa, synthetic construct
QSQQSYDYGG

SEQ ID NO: 20538 - protein, 9 aa, synthetic construct
PNADLLFRN

SEQ ID NO: 20539 - protein, 9 aa, synthetic construct
NPFRVALEY

SEQ ID NO: 20540 - protein, 11 aa, synthetic construct
GGPAPPAAAFS

SEQ ID NO: 20541 - protein, 10 aa, synthetic construct
KPGGSAVLAL

SEQ ID NO: 20542 - protein, 8 aa, synthetic construct
NLLIQQAI

SEQ ID NO: 20543 - protein, 9 aa, synthetic construct
NPSARLTAL

SEQ ID NO: 20544 - protein, 9 aa, synthetic construct
GPNILDNFY

SEQ ID NO: 20545 - protein, 9 aa, synthetic construct
NPDAVLRVG

SEQ ID NO: 20546 - protein, 11 aa, synthetic construct
GEGTVWAGEEG

SEQ ID NO: 20547 - protein, 10 aa, synthetic construct
TCEKHGDAEY

SEQ ID NO: 20548 - protein, 11 aa, synthetic construct
EEEPSASSPQY

SEQ ID NO: 20549 - protein, 11 aa, synthetic construct
YTNGSAARSPN

SEQ ID NO: 20550 - protein, 9 aa, synthetic construct
NPDLKDRMV

SEQ ID NO: 20551 - protein, 10 aa, synthetic construct
PVNENAAALV

SEQ ID NO: 20552 - protein, 10 aa, synthetic construct
NAARDFINVI

SEQ ID NO: 20553 - protein, 11 aa, synthetic construct
NPAKATVTAMI

SEQ ID NO: 20554 - protein, 10 aa, synthetic construct
NPDNGYIKVL

SEQ ID NO: 20555 - protein, 10 aa, synthetic construct
NHCVKLISWY

SEQ ID NO: 20556 - protein, 10 aa, synthetic construct
DALPSGYVSF

SEQ ID NO: 20557 - protein, 14 aa, synthetic construct
NPFSDSRTPPPGGV

SEQ ID NO: 20558 - protein, 9 aa, synthetic construct
GGPFRFKFH

SEQ ID NO: 20559 - protein, 10 aa, synthetic construct
SKSDLCGSIF

SEQ ID NO: 20560 - protein, 11 aa, synthetic construct
QNQGKAEEVEY

SEQ ID NO: 20561 - protein, 10 aa, synthetic construct
ANGMIEALFV

SEQ ID NO: 20562 - protein, 9 aa, synthetic construct
MKSFLAIPN

SEQ ID NO: 20563 - protein, 9 aa, synthetic construct
GGPLRHKEA

SEQ ID NO: 20564 - protein, 9 aa, synthetic construct
VQEPDDIIF

SEQ ID NO: 20565 - protein, 10 aa, synthetic construct
QLAAANEPTF

SEQ ID NO: 20566 - protein, 9 aa, synthetic construct
SNGPLLLEY

SEQ ID NO: 20567 - protein, 10 aa, synthetic construct
PGAVSTISEI

SEQ ID NO: 20568 - protein, 10 aa, synthetic construct
NPITVEMKGL

SEQ ID NO: 20569 - protein, 9 aa, synthetic construct
EKAPTNIVY

SEQ ID NO: 20570 - protein, 9 aa, synthetic construct
GGKIPKDIL

SEQ ID NO: 20571 - protein, 9 aa, synthetic construct
NLSAHVVWL

SEQ ID NO: 20572 - protein, 8 aa, synthetic construct
NPLNFYHV

SEQ ID NO: 20573 - protein, 9 aa, synthetic construct
HLQDVPYVM

SEQ ID NO: 20574 - protein, 12 aa, synthetic construct
NLPLDEFYPAVS

SEQ ID NO: 20575 - protein, 9 aa, synthetic construct
NFPKIHWTF

SEQ ID NO: 20576 - protein, 12 aa, synthetic construct
GGPINPATAAAY

SEQ ID NO: 20577 - protein, 10 aa, synthetic construct
QLNGSANALF

SEQ ID NO: 20578 - protein, 9 aa, synthetic construct
NPREVRLAL

SEQ ID NO: 20579 - protein, 9 aa, synthetic construct
NPKPIVTWL

SEQ ID NO: 20580 - protein, 10 aa, synthetic construct
GGPARRLLDL

SEQ ID NO: 20581 - protein, 9 aa, synthetic construct
STPLSHSTY

SEQ ID NO: 20582 - protein, 8 aa, synthetic construct
SHTEEKLY

SEQ ID NO: 20583 - protein, 9 aa, synthetic construct
PNCTRLLTN

SEQ ID NO: 20584 - protein, 9 aa, synthetic construct
NPWVKVDTI

SEQ ID NO: 20585 - protein, 10 aa, synthetic construct
NDLAPSLQTL

SEQ ID NO: 20586 - protein, 9 aa, synthetic construct
RSPAQFSEF

SEQ ID NO: 20587 - protein, 9 aa, synthetic construct
PMRNSQALI

SEQ ID NO: 20588 - protein, 10 aa, synthetic construct
GGDPRGLFSL

SEQ ID NO: 20589 - protein, 9 aa, synthetic construct
TFNPHFISL

SEQ ID NO: 20590 - protein, 12 aa, synthetic construct
PWAQATSAHSVL

SEQ ID NO: 20591 - protein, 10 aa, synthetic construct
VFDKHPGIYL

SEQ ID NO: 20592 - protein, 9 aa, synthetic construct
RLREADTEI

SEQ ID NO: 20593 - protein, 10 aa, synthetic construct
SIPVINGRDL

SEQ ID NO: 20594 - protein, 9 aa, synthetic construct
ARPVLQSSI

SEQ ID NO: 20595 - protein, 10 aa, synthetic construct
NIEEKCGNQL

SEQ ID NO: 20596 - protein, 11 aa, synthetic construct
TLMITSSIFVL

SEQ ID NO: 20597 - protein, 13 aa, synthetic construct
APGRLGPGPSAGL

SEQ ID NO: 20598 - protein, 9 aa, synthetic construct
RKVNPAAAL

SEQ ID NO: 20599 - protein, 9 aa, synthetic construct
NPLMTPDIL

SEQ ID NO: 20600 - protein, 8 aa, synthetic construct
DKPNLQFD

SEQ ID NO: 20601 - protein, 9 aa, synthetic construct
NPISLAMTL

SEQ ID NO: 20602 - protein, 9 aa, synthetic construct
NQPSSLVML

SEQ ID NO: 20603 - protein, 9 aa, synthetic construct
DGENARLTY

SEQ ID NO: 20604 - protein, 9 aa, synthetic construct
AFSENPTVF

SEQ ID NO: 20605 - protein, 10 aa, synthetic construct
SMEQAVLDSM

SEQ ID NO: 20606 - protein, 9 aa, synthetic construct
VYLQPSDSY

SEQ ID NO: 20607 - protein, 9 aa, synthetic construct
IVPSTQDIY

SEQ ID NO: 20608 - protein, 9 aa, synthetic construct
DILEGLVNY

SEQ ID NO: 20609 - protein, 9 aa, synthetic construct
STVLDPNVL

SEQ ID NO: 20610 - protein, 10 aa, synthetic construct
NPVVMVDEIM

SEQ ID NO: 20611 - protein, 10 aa, synthetic construct
SMLGIGDIVM

SEQ ID NO: 20612 - protein, 8 aa, synthetic construct
LPVLNNEY

SEQ ID NO: 20613 - protein, 10 aa, synthetic construct
PAAAQLADTF

SEQ ID NO: 20614 - protein, 9 aa, synthetic construct
SVYPHVQTF

SEQ ID NO: 20615 - protein, 9 aa, synthetic construct
HLMDKQGVY

SEQ ID NO: 20616 - protein, 9 aa, synthetic construct
DQRQELVAF

SEQ ID NO: 20617 - protein, 10 aa, synthetic construct
RGGENPVLIF

SEQ ID NO: 20618 - protein, 10 aa, synthetic construct
NPYQTFLGPT

SEQ ID NO: 20619 - protein, 10 aa, synthetic construct
RLDSAMAVCF

SEQ ID NO: 20620 - protein, 9 aa, synthetic construct
LDSMKDEEY

SEQ ID NO: 20621 - protein, 9 aa, synthetic construct
NPYEKFSKE

SEQ ID NO: 20622 - protein, 8 aa, synthetic construct
NPYKWLML

SEQ ID NO: 20623 - protein, 9 aa, synthetic construct
MDNISLEYF

SEQ ID NO: 20624 - protein, 9 aa, synthetic construct
DQGASYLLL

SEQ ID NO: 20625 - protein, 10 aa, synthetic construct
GQGFDSVISR

SEQ ID NO: 20626 - protein, 10 aa, synthetic construct
WLAAGSSSYL

SEQ ID NO: 20627 - protein, 9 aa, synthetic construct
STRGSVHSL

SEQ ID NO: 20628 - protein, 9 aa, synthetic construct
NQLLGLKGV

SEQ ID NO: 20629 - protein, 13 aa, synthetic construct
VKSGVAGGGIAGY

SEQ ID NO: 20630 - protein, 8 aa, synthetic construct
NQIRQISV

SEQ ID NO: 20631 - protein, 8 aa, synthetic construct
SLNQWLVS

SEQ ID NO: 20632 - protein, 8 aa, synthetic construct
VEWGIINL

SEQ ID NO: 20633 - protein, 11 aa, synthetic construct
FKEHIAASVSI

SEQ ID NO: 20634 - protein, 10 aa, synthetic construct
LTNAGFLQTE

SEQ ID NO: 20635 - protein, 8 aa, synthetic construct
NTQPIPIL

SEQ ID NO: 20636 - protein, 9 aa, synthetic construct
NGAYRTVLV

SEQ ID NO: 20637 - protein, 11 aa, synthetic construct
GQHLAALPVNV

SEQ ID NO: 20638 - protein, 8 aa, synthetic construct
LCQTVVPL

SEQ ID NO: 20639 - protein, 10 aa, synthetic construct
LEDVSKYPDL

SEQ ID NO: 20640 - protein, 10 aa, synthetic construct
GGVDRQHLGL

SEQ ID NO: 20641 - protein, 9 aa, synthetic construct
GLLYRARYF

SEQ ID NO: 20642 - protein, 9 aa, synthetic construct
SSHKRRQIF

SEQ ID NO: 20643 - protein, 11 aa, synthetic construct
MVQGHAAFPEL

SEQ ID NO: 20644 - protein, 9 aa, synthetic construct
VPWKSSNSI

SEQ ID NO: 20645 - protein, 10 aa, synthetic construct
RPGFWGKPVL

SEQ ID NO: 20646 - protein, 9 aa, synthetic construct
VMSQKFVML

SEQ ID NO: 20647 - protein, 9 aa, synthetic construct
RKFNIRKVL

SEQ ID NO: 20648 - protein, 10 aa, synthetic construct
LEGRVAPKTV

SEQ ID NO: 20649 - protein, 9 aa, synthetic construct
WLSLPKLTY

SEQ ID NO: 20650 - protein, 9 aa, synthetic construct
LRDLHPLPK

SEQ ID NO: 20651 - protein, 9 aa, synthetic construct
MDFRKLSTF

SEQ ID NO: 20652 - protein, 13 aa, synthetic construct
TSAEPAGPLPALL

SEQ ID NO: 20653 - protein, 10 aa, synthetic construct
AAVLECLTFE

SEQ ID NO: 20654 - protein, 7 aa, synthetic construct
RNKEMEL

SEQ ID NO: 20655 - protein, 9 aa, synthetic construct
EMLLRLNAL

SEQ ID NO: 20656 - protein, 10 aa, synthetic construct
QAAVQYPYEV

SEQ ID NO: 20657 - protein, 11 aa, synthetic construct
ASASMSALYKV

SEQ ID NO: 20658 - protein, 11 aa, synthetic construct
EALEVGAVPVV

SEQ ID NO: 20659 - protein, 13 aa, synthetic construct
PTGNTGSKAETGF

SEQ ID NO: 20660 - protein, 10 aa, synthetic construct
AEGSEDQVLY

SEQ ID NO: 20661 - protein, 10 aa, synthetic construct
TPSGTEDQLY

SEQ ID NO: 20662 - protein, 9 aa, synthetic construct
GDGSVSWVL

SEQ ID NO: 20663 - protein, 9 aa, synthetic construct
ETQGTVIYN

SEQ ID NO: 20664 - protein, 11 aa, synthetic construct
DASGITCGGIY

SEQ ID NO: 20665 - protein, 9 aa, synthetic construct
SQDPETELY

SEQ ID NO: 20666 - protein, 9 aa, synthetic construct
VTGSGFSVS

SEQ ID NO: 20667 - protein, 11 aa, synthetic construct
FNSVKNGSTWT

SEQ ID NO: 20668 - protein, 12 aa, synthetic construct
GYAGVNVTDLTM

SEQ ID NO: 20669 - protein, 8 aa, synthetic construct
QMFMYDLY

SEQ ID NO: 20670 - protein, 9 aa, synthetic construct
NDKDDQVLN

SEQ ID NO: 20671 - protein, 9 aa, synthetic construct
LENVQNTEN

SEQ ID NO: 20672 - protein, 10 aa, synthetic construct
DLDVGSNNVQ

SEQ ID NO: 20673 - protein, 9 aa, synthetic construct
AQLPMEELN

SEQ ID NO: 20674 - protein, 12 aa, synthetic construct
GDGSGAAGLELN

SEQ ID NO: 20675 - protein, 10 aa, synthetic construct
ATPHAQVLSY

SEQ ID NO: 20676 - protein, 8 aa, synthetic construct
NLFSIIMI

SEQ ID NO: 20677 - protein, 10 aa, synthetic construct
GGSLFLTYEV

SEQ ID NO: 20678 - protein, 9 aa, synthetic construct
LSQHVVTNY

SEQ ID NO: 20679 - protein, 10 aa, synthetic construct
NSSPWSTGGL

SEQ ID NO: 20680 - protein, 11 aa, synthetic construct
TAAALMGGTAL

SEQ ID NO: 20681 - protein, 10 aa, synthetic construct
AAPTAPNGTL

SEQ ID NO: 20682 - protein, 10 aa, synthetic construct
NSPIMVVSSN

SEQ ID NO: 20683 - protein, 9 aa, synthetic construct
SNPCFSVTT

SEQ ID NO: 20684 - protein, 8 aa, synthetic construct
QFVLKLGI

SEQ ID NO: 20685 - protein, 9 aa, synthetic construct
PSLQSIYTL

SEQ ID NO: 20686 - protein, 11 aa, synthetic construct
GGDQTMAAWEF

SEQ ID NO: 20687 - protein, 8 aa, synthetic construct
EVMSDQEL

SEQ ID NO: 20688 - protein, 8 aa, synthetic construct
SYARQMMF

SEQ ID NO: 20689 - protein, 9 aa, synthetic construct
FFADDDNTY

SEQ ID NO: 20690 - protein, 10 aa, synthetic construct
EMTAGASDYF

SEQ ID NO: 20691 - protein, 10 aa, synthetic construct
PVDGEYAVEC

SEQ ID NO: 20692 - protein, 9 aa, synthetic construct
FQNSEFYGF

SEQ ID NO: 20693 - protein, 10 aa, synthetic construct
YNVTEMSLIY

SEQ ID NO: 20694 - protein, 9 aa, synthetic construct
ENESALNLY

SEQ ID NO: 20695 - protein, 9 aa, synthetic construct
DQSPSTLNY

SEQ ID NO: 20696 - protein, 8 aa, synthetic construct
EIEWITEY

SEQ ID NO: 20697 - protein, 9 aa, synthetic construct
LVENTNETY

SEQ ID NO: 20698 - protein, 12 aa, synthetic construct
NTDATPVTHGTE

SEQ ID NO: 20699 - protein, 12 aa, synthetic construct
SQDMISSSTTSV

SEQ ID NO: 20700 - protein, 9 aa, synthetic construct
NEGTGGVYL

SEQ ID NO: 20701 - protein, 10 aa, synthetic construct
WDDNLSTAIY

SEQ ID NO: 20702 - protein, 9 aa, synthetic construct
SAGDSLMIR

SEQ ID NO: 20703 - protein, 9 aa, synthetic construct
SDGASPIRY

SEQ ID NO: 20704 - protein, 9 aa, synthetic construct
GGTDMQTKK

SEQ ID NO: 20705 - protein, 8 aa, synthetic construct
LKVEMDTN

SEQ ID NO: 20706 - protein, 8 aa, synthetic construct
NTDKEMIV

SEQ ID NO: 20707 - protein, 9 aa, synthetic construct
SQEAVEKYE

SEQ ID NO: 20708 - protein, 9 aa, synthetic construct
QSLNHGMAL

SEQ ID NO: 20709 - protein, 10 aa, synthetic construct
NSLAVTMDDF

SEQ ID NO: 20710 - protein, 8 aa, synthetic construct
NIYTDSKY

SEQ ID NO: 20711 - protein, 11 aa, synthetic construct
NVADQGPGIAF

SEQ ID NO: 20712 - protein, 9 aa, synthetic construct
NVAAEIFLK

SEQ ID NO: 20713 - protein, 9 aa, synthetic construct
ELDVVQAEY

SEQ ID NO: 20714 - protein, 9 aa, synthetic construct
PSSGSFVLE

SEQ ID NO: 20715 - protein, 11 aa, synthetic construct
AASTPSDSLIY

SEQ ID NO: 20716 - protein, 9 aa, synthetic construct
RMEPGEPLQ

SEQ ID NO: 20717 - protein, 9 aa, synthetic construct
QDLEKAELQ

SEQ ID NO: 20718 - protein, 9 aa, synthetic construct
WWTPEPLAG

SEQ ID NO: 20719 - protein, 9 aa, synthetic construct
QGPCKEPLQ

SEQ ID NO: 20720 - protein, 10 aa, synthetic construct
VFNGVESQNV

SEQ ID NO: 20721 - protein, 9 aa, synthetic construct
VDAWHSISF

SEQ ID NO: 20722 - protein, 9 aa, synthetic construct
CHLLDSVSF

SEQ ID NO: 20723 - protein, 10 aa, synthetic construct
GGVIADKIQF

SEQ ID NO: 20724 - protein, 11 aa, synthetic construct
VGGLEPGHKYK

SEQ ID NO: 20725 - protein, 9 aa, synthetic construct
VLDQTLSSL

SEQ ID NO: 20726 - protein, 12 aa, synthetic construct
GGVLDAADRSAD

SEQ ID NO: 20727 - protein, 9 aa, synthetic construct
VQQVHVATY

SEQ ID NO: 20728 - protein, 10 aa, synthetic construct
GGVALIWATY

SEQ ID NO: 20729 - protein, 9 aa, synthetic construct
VNVKEKIYA

SEQ ID NO: 20730 - protein, 9 aa, synthetic construct
NVKDPVEIQ

SEQ ID NO: 20731 - protein, 9 aa, synthetic construct
QAKVEPEIQ

SEQ ID NO: 20732 - protein, 9 aa, synthetic construct
LGEKQPELQ

SEQ ID NO: 20733 - protein, 9 aa, synthetic construct
VLDNVDYYE

SEQ ID NO: 20734 - protein, 9 aa, synthetic construct
MVNSMDKSY

SEQ ID NO: 20735 - protein, 9 aa, synthetic construct
VQAQLTLSY

SEQ ID NO: 20736 - protein, 10 aa, synthetic construct
LLVAQGADVH

SEQ ID NO: 20737 - protein, 9 aa, synthetic construct
GVGQEPTLT

SEQ ID NO: 20738 - protein, 9 aa, synthetic construct
AAAPSLLAP

SEQ ID NO: 20739 - protein, 8 aa, synthetic construct
PGVKVLRG

SEQ ID NO: 20740 - protein, 11 aa, synthetic construct
AAAKLFAGSRG

SEQ ID NO: 20741 - protein, 9 aa, synthetic construct
EVNRECSVF

SEQ ID NO: 20742 - protein, 9 aa, synthetic construct
ALQSVRTAL

SEQ ID NO: 20743 - protein, 8 aa, synthetic construct
WLKYSTAL

SEQ ID NO: 20744 - protein, 9 aa, synthetic construct
QKAVRPLEL

SEQ ID NO: 20745 - protein, 11 aa, synthetic construct
GKGVLRQITVN

SEQ ID NO: 20746 - protein, 10 aa, synthetic construct
NVTLKWKKPA

SEQ ID NO: 20747 - protein, 12 aa, synthetic construct
SLGSGVGDGGVE

SEQ ID NO: 20748 - protein, 10 aa, synthetic construct
VNSSSSLNPE

SEQ ID NO: 20749 - protein, 9 aa, synthetic construct
KENLVLGGY

SEQ ID NO: 20750 - protein, 10 aa, synthetic construct
VAALGAALVF

SEQ ID NO: 20751 - protein, 10 aa, synthetic construct
LGGVLDAILA

SEQ ID NO: 20752 - protein, 10 aa, synthetic construct
YEALVKVINN

SEQ ID NO: 20753 - protein, 10 aa, synthetic construct
LALQQIADFM

SEQ ID NO: 20754 - protein, 10 aa, synthetic construct
ALQQLLDEHD

SEQ ID NO: 20755 - protein, 10 aa, synthetic construct
NVYQPTEMAV

SEQ ID NO: 20756 - protein, 10 aa, synthetic construct
PHPCFLDPAP

SEQ ID NO: 20757 - protein, 9 aa, synthetic construct
LHVPAVAVC

SEQ ID NO: 20758 - protein, 9 aa, synthetic construct
YNDCFSKSL

SEQ ID NO: 20759 - protein, 9 aa, synthetic construct
YNDAEILLR

SEQ ID NO: 20760 - protein, 10 aa, synthetic construct
YNDGMNITVL

SEQ ID NO: 20761 - protein, 9 aa, synthetic construct
YNDHKVCAS

SEQ ID NO: 20762 - protein, 9 aa, synthetic construct
DFYFMKNGS

SEQ ID NO: 20763 - protein, 10 aa, synthetic construct
LAQEKLADQM

SEQ ID NO: 20764 - protein, 9 aa, synthetic construct
NYGILGWNI

SEQ ID NO: 20765 - protein, 9 aa, synthetic construct
YNLDKFRVL

SEQ ID NO: 20766 - protein, 10 aa, synthetic construct
NYLLGKFSQV

SEQ ID NO: 20767 - protein, 9 aa, synthetic construct
NYLGNILRL

SEQ ID NO: 20768 - protein, 10 aa, synthetic construct
NYIHRADARQ

SEQ ID NO: 20769 - protein, 11 aa, synthetic construct
LGEYNIDVLEG

SEQ ID NO: 20770 - protein, 9 aa, synthetic construct
NYISALNTL

SEQ ID NO: 20771 - protein, 9 aa, synthetic construct
NYLGSTQLL

SEQ ID NO: 20772 - protein, 11 aa, synthetic construct
NYIVETPRIGW

SEQ ID NO: 20773 - protein, 9 aa, synthetic construct
EHLLLDLQM

SEQ ID NO: 20774 - protein, 7 aa, synthetic construct
NYLHTQK

SEQ ID NO: 20775 - protein, 9 aa, synthetic construct
DWNLNIYFN

SEQ ID NO: 20776 - protein, 10 aa, synthetic construct
LYGGFPFPLE

SEQ ID NO: 20777 - protein, 9 aa, synthetic construct
NYQAMKLTL

SEQ ID NO: 20778 - protein, 11 aa, synthetic construct
NYDIPNLAKKL

SEQ ID NO: 20779 - protein, 10 aa, synthetic construct
YGGGPISSIL

SEQ ID NO: 20780 - protein, 9 aa, synthetic construct
IPMYVRHTY

SEQ ID NO: 20781 - protein, 11 aa, synthetic construct
NYVGATFQGKM

SEQ ID NO: 20782 - protein, 8 aa, synthetic construct
YNVSFRVI

SEQ ID NO: 20783 - protein, 9 aa, synthetic construct
NMDLWVSHE

SEQ ID NO: 20784 - protein, 9 aa, synthetic construct
DEEEDYDVY

SEQ ID NO: 20785 - protein, 9 aa, synthetic construct
NMVLIGFFS

SEQ ID NO: 20786 - protein, 9 aa, synthetic construct
NMNNAVRPV

SEQ ID NO: 20787 - protein, 9 aa, synthetic construct
TCSFLKTAV

SEQ ID NO: 20788 - protein, 7 aa, synthetic construct
PAEIRNL

SEQ ID NO: 20789 - protein, 8 aa, synthetic construct
LEPTIATW

SEQ ID NO: 20790 - protein, 9 aa, synthetic construct
DVLGPLPNS

SEQ ID NO: 20791 - protein, 8 aa, synthetic construct
KTEGDAQP

SEQ ID NO: 20792 - protein, 7 aa, synthetic construct
PLNRKGL

SEQ ID NO: 20793 - protein, 8 aa, synthetic construct
APGSEVTI

SEQ ID NO: 20794 - protein, 9 aa, synthetic construct
PAPAPARSL

SEQ ID NO: 20795 - protein, 9 aa, synthetic construct
PALVGRSII

SEQ ID NO: 20796 - protein, 9 aa, synthetic construct
PAPLPCTPA

SEQ ID NO: 20797 - protein, 9 aa, synthetic construct
PASVHLRVP

SEQ ID NO: 20798 - protein, 10 aa, synthetic construct
APTLQSLFGP

SEQ ID NO: 20799 - protein, 9 aa, synthetic construct
AVPAHRLQL

SEQ ID NO: 20800 - protein, 11 aa, synthetic construct
PRKDGASPFQR

SEQ ID NO: 20801 - protein, 11 aa, synthetic construct
PHSKPSAFFLQ

SEQ ID NO: 20802 - protein, 8 aa, synthetic construct
QPMPPSMG

SEQ ID NO: 20803 - protein, 8 aa, synthetic construct
PEGWMPAG

SEQ ID NO: 20804 - protein, 8 aa, synthetic construct
AMPGPWGE

SEQ ID NO: 20805 - protein, 8 aa, synthetic construct
DWPAPMLQ

SEQ ID NO: 20806 - protein, 8 aa, synthetic construct
PNLSLRIF

SEQ ID NO: 20807 - protein, 8 aa, synthetic construct
PDYDFARY

SEQ ID NO: 20808 - protein, 9 aa, synthetic construct
IEGPSVSIM

SEQ ID NO: 20809 - protein, 11 aa, synthetic construct
QTHPVLESGLL

SEQ ID NO: 20810 - protein, 11 aa, synthetic construct
IPAFMVKGGEK

SEQ ID NO: 20811 - protein, 10 aa, synthetic construct
HLPPDVRETL

SEQ ID NO: 20812 - protein, 12 aa, synthetic construct
QTLDKNTPSPES

SEQ ID NO: 20813 - protein, 8 aa, synthetic construct
PSLETPLK

SEQ ID NO: 20814 - protein, 10 aa, synthetic construct
PDPTTVYVDM

SEQ ID NO: 20815 - protein, 9 aa, synthetic construct
VPEKPIIDK

SEQ ID NO: 20816 - protein, 11 aa, synthetic construct
IMNGIIKWGDP

SEQ ID NO: 20817 - protein, 8 aa, synthetic construct
PESNRLKL

SEQ ID NO: 20818 - protein, 11 aa, synthetic construct
LSSPGDGLKLP

SEQ ID NO: 20819 - protein, 8 aa, synthetic construct
PDTLGSSK

SEQ ID NO: 20820 - protein, 10 aa, synthetic construct
PADVRITSKI

SEQ ID NO: 20821 - protein, 11 aa, synthetic construct
EPEVKDSLGVY

SEQ ID NO: 20822 - protein, 8 aa, synthetic construct
PEFSLKKY

SEQ ID NO: 20823 - protein, 9 aa, synthetic construct
PATYRAQVL

SEQ ID NO: 20824 - protein, 9 aa, synthetic construct
PQPVPGEIK

SEQ ID NO: 20825 - protein, 8 aa, synthetic construct
LDHLEPKL

SEQ ID NO: 20826 - protein, 8 aa, synthetic construct
PEELHVKL

SEQ ID NO: 20827 - protein, 8 aa, synthetic construct
VVRIHPEP

SEQ ID NO: 20828 - protein, 8 aa, synthetic construct
IPENVDIT

SEQ ID NO: 20829 - protein, 9 aa, synthetic construct
PETSVKKPK

SEQ ID NO: 20830 - protein, 10 aa, synthetic construct
PFELGNFAAT

SEQ ID NO: 20831 - protein, 8 aa, synthetic construct
PFHLLVYS

SEQ ID NO: 20832 - protein, 10 aa, synthetic construct
YIPFGGGARS

SEQ ID NO: 20833 - protein, 8 aa, synthetic construct
FPKLLIHY

SEQ ID NO: 20834 - protein, 9 aa, synthetic construct
KSNSKLKPE

SEQ ID NO: 20835 - protein, 9 aa, synthetic construct
PFEEKVEVE

SEQ ID NO: 20836 - protein, 10 aa, synthetic construct
PFHYKNGTYY

SEQ ID NO: 20837 - protein, 10 aa, synthetic construct
PNPAAMLFTF

SEQ ID NO: 20838 - protein, 9 aa, synthetic construct
PFMFSLHLN

SEQ ID NO: 20839 - protein, 9 aa, synthetic construct
PEMVRFEPT

SEQ ID NO: 20840 - protein, 8 aa, synthetic construct
PNGSLLDR

SEQ ID NO: 20841 - protein, 8 aa, synthetic construct
PGDESRVL

SEQ ID NO: 20842 - protein, 11 aa, synthetic construct
ELCLGIMGGKP

SEQ ID NO: 20843 - protein, 11 aa, synthetic construct
SSPPFSLPCKA

SEQ ID NO: 20844 - protein, 12 aa, synthetic construct
VPGNGMKGFLGP

SEQ ID NO: 20845 - protein, 9 aa, synthetic construct
PEQRNLYRD

SEQ ID NO: 20846 - protein, 9 aa, synthetic construct
PGFAAVVRE

SEQ ID NO: 20847 - protein, 9 aa, synthetic construct
IAKNTKTLL

SEQ ID NO: 20848 - protein, 9 aa, synthetic construct
PMGRIKGTL

SEQ ID NO: 20849 - protein, 9 aa, synthetic construct
QAEAVLKTL

SEQ ID NO: 20850 - protein, 9 aa, synthetic construct
LTKVPSNIT

SEQ ID NO: 20851 - protein, 9 aa, synthetic construct
PAVKKESTL

SEQ ID NO: 20852 - protein, 9 aa, synthetic construct
PPPAKAKTF

SEQ ID NO: 20853 - protein, 11 aa, synthetic construct
PGRPGTKPPKR

SEQ ID NO: 20854 - protein, 9 aa, synthetic construct
PGTVEKEAK

SEQ ID NO: 20855 - protein, 9 aa, synthetic construct
GVPTLDNIK

SEQ ID NO: 20856 - protein, 10 aa, synthetic construct
PGLSISQLAA

SEQ ID NO: 20857 - protein, 10 aa, synthetic construct
PAGGLFHSAG

SEQ ID NO: 20858 - protein, 11 aa, synthetic construct
PPLRAAAEQLR

SEQ ID NO: 20859 - protein, 10 aa, synthetic construct
PGNKNGRNVK

SEQ ID NO: 20860 - protein, 8 aa, synthetic construct
PGYLNRIH

SEQ ID NO: 20861 - protein, 8 aa, synthetic construct
PHDKEILK

SEQ ID NO: 20862 - protein, 8 aa, synthetic construct
PHAIDLLR

SEQ ID NO: 20863 - protein, 8 aa, synthetic construct
PHELRLGL

SEQ ID NO: 20864 - protein, 9 aa, synthetic construct
PHYTPSVAY

SEQ ID NO: 20865 - protein, 8 aa, synthetic construct
SFFNLRSP

SEQ ID NO: 20866 - protein, 8 aa, synthetic construct
PHMLRVFM

SEQ ID NO: 20867 - protein, 8 aa, synthetic construct
KHPGLVLI

SEQ ID NO: 20868 - protein, 8 aa, synthetic construct
PHLQGLKS

SEQ ID NO: 20869 - protein, 8 aa, synthetic construct
PHLPYKAA

SEQ ID NO: 20870 - protein, 7 aa, synthetic construct
PHISFRI

SEQ ID NO: 20871 - protein, 9 aa, synthetic construct
PHLPLRARM

SEQ ID NO: 20872 - protein, 10 aa, synthetic construct
PHLEAVVIGR

SEQ ID NO: 20873 - protein, 9 aa, synthetic construct
PHLHGFLQP

SEQ ID NO: 20874 - protein, 9 aa, synthetic construct
PHIFVATNF

SEQ ID NO: 20875 - protein, 10 aa, synthetic construct
HPLPGPPFSP

SEQ ID NO: 20876 - protein, 9 aa, synthetic construct
PVGVARHSL

SEQ ID NO: 20877 - protein, 9 aa, synthetic construct
LPQHPEGGI

SEQ ID NO: 20878 - protein, 8 aa, synthetic construct
HPQTSFPL

SEQ ID NO: 20879 - protein, 9 aa, synthetic construct
PHAGSLRIF

SEQ ID NO: 20880 - protein, 10 aa, synthetic construct
PIDTTIIMNG

SEQ ID NO: 20881 - protein, 8 aa, synthetic construct
PIFLSQLD

SEQ ID NO: 20882 - protein, 8 aa, synthetic construct
LPRNQREL

SEQ ID NO: 20883 - protein, 9 aa, synthetic construct
IPRGFLPPE

SEQ ID NO: 20884 - protein, 9 aa, synthetic construct
PLQQAKPVV

SEQ ID NO: 20885 - protein, 10 aa, synthetic construct
PLISVSVPAP

SEQ ID NO: 20886 - protein, 9 aa, synthetic construct
PLLSLHKAT

SEQ ID NO: 20887 - protein, 9 aa, synthetic construct
LLPSPRSLP

SEQ ID NO: 20888 - protein, 10 aa, synthetic construct
PLLMAGRFVA

SEQ ID NO: 20889 - protein, 11 aa, synthetic construct
PLLPPGTSPPV

SEQ ID NO: 20890 - protein, 9 aa, synthetic construct
PLELKEAFK

SEQ ID NO: 20891 - protein, 9 aa, synthetic construct
LPLQNLIRV

SEQ ID NO: 20892 - protein, 10 aa, synthetic construct
PLQELRGAGW

SEQ ID NO: 20893 - protein, 10 aa, synthetic construct
HIGWVTSELP

SEQ ID NO: 20894 - protein, 9 aa, synthetic construct
PITFVVLAS

SEQ ID NO: 20895 - protein, 9 aa, synthetic construct
IPLTVFGLS

SEQ ID NO: 20896 - protein, 8 aa, synthetic construct
TLFVEKLP

SEQ ID NO: 20897 - protein, 9 aa, synthetic construct
PLTLSVFSL

SEQ ID NO: 20898 - protein, 13 aa, synthetic construct
SEELAPVTPMEVY

SEQ ID NO: 20899 - protein, 8 aa, synthetic construct
KPFSFKIL

SEQ ID NO: 20900 - protein, 9 aa, synthetic construct
PKIGLSLKL

SEQ ID NO: 20901 - protein, 8 aa, synthetic construct
KPKIVCAI

SEQ ID NO: 20902 - protein, 10 aa, synthetic construct
PEELRAAIED

SEQ ID NO: 20903 - protein, 8 aa, synthetic construct
KPIRPIGI

SEQ ID NO: 20904 - protein, 9 aa, synthetic construct
PKPLAPAPL

SEQ ID NO: 20905 - protein, 10 aa, synthetic construct
PKTKDVCSRF

SEQ ID NO: 20906 - protein, 9 aa, synthetic construct
KADVSVHIP

SEQ ID NO: 20907 - protein, 9 aa, synthetic construct
PLSGYSITK

SEQ ID NO: 20908 - protein, 8 aa, synthetic construct
LPARVKAI

SEQ ID NO: 20909 - protein, 8 aa, synthetic construct
LPGLRRLL

SEQ ID NO: 20910 - protein, 8 aa, synthetic construct
HKVKVTPL

SEQ ID NO: 20911 - protein, 10 aa, synthetic construct
IPIHGNGEAR

SEQ ID NO: 20912 - protein, 9 aa, synthetic construct
PLIHDLLLE

SEQ ID NO: 20913 - protein, 9 aa, synthetic construct
PRMVPVLLL

SEQ ID NO: 20914 - protein, 8 aa, synthetic construct
PLLPHQKQ

SEQ ID NO: 20915 - protein, 9 aa, synthetic construct
LPTHPGHTF

SEQ ID NO: 20916 - protein, 11 aa, synthetic construct
SGSGRVPAPLP

SEQ ID NO: 20917 - protein, 10 aa, synthetic construct
PISHAVLAMV

SEQ ID NO: 20918 - protein, 9 aa, synthetic construct
LPSHRHPPP

SEQ ID NO: 20919 - protein, 9 aa, synthetic construct
QIRNVSQLP

SEQ ID NO: 20920 - protein, 8 aa, synthetic construct
LPSKIKTL

SEQ ID NO: 20921 - protein, 9 aa, synthetic construct
TFSRPKGHL

SEQ ID NO: 20922 - protein, 8 aa, synthetic construct
LSKLTSPI

SEQ ID NO: 20923 - protein, 9 aa, synthetic construct
LPVPASTLR

SEQ ID NO: 20924 - protein, 8 aa, synthetic construct
LPLVNELR

SEQ ID NO: 20925 - protein, 12 aa, synthetic construct
VGTKNGEILEID

SEQ ID NO: 20926 - protein, 9 aa, synthetic construct
PNRINLGRL

SEQ ID NO: 20927 - protein, 8 aa, synthetic construct
IPNEIIHA

SEQ ID NO: 20928 - protein, 9 aa, synthetic construct
QGATLLHIA

SEQ ID NO: 20929 - protein, 8 aa, synthetic construct
TEDNMLFY

SEQ ID NO: 20930 - protein, 9 aa, synthetic construct
PNANLVKTL

SEQ ID NO: 20931 - protein, 9 aa, synthetic construct
PNQAGKKKV

SEQ ID NO: 20932 - protein, 10 aa, synthetic construct
PSALMKIPLL

SEQ ID NO: 20933 - protein, 10 aa, synthetic construct
PGGWQHAKGV

SEQ ID NO: 20934 - protein, 10 aa, synthetic construct
PGVAPPRPSL

SEQ ID NO: 20935 - protein, 10 aa, synthetic construct
PPAVLTMGPE

SEQ ID NO: 20936 - protein, 7 aa, synthetic construct
YSLRFSP

SEQ ID NO: 20937 - protein, 9 aa, synthetic construct
PLPSFSSNS

SEQ ID NO: 20938 - protein, 9 aa, synthetic construct
PPIPRPAKL

SEQ ID NO: 20939 - protein, 10 aa, synthetic construct
PSPLPPGQGV

SEQ ID NO: 20940 - protein, 10 aa, synthetic construct
PGSARIPFRV

SEQ ID NO: 20941 - protein, 9 aa, synthetic construct
PPLLDSIKT

SEQ ID NO: 20942 - protein, 9 aa, synthetic construct
PVVLPETTK

SEQ ID NO: 20943 - protein, 13 aa, synthetic construct
PDFVHLVAQIAAG

SEQ ID NO: 20944 - protein, 12 aa, synthetic construct
VEVEAPNLRTLP

SEQ ID NO: 20945 - protein, 14 aa, synthetic construct
GRGAPEIVAGRGTP

SEQ ID NO: 20946 - protein, 8 aa, synthetic construct
PQHEKRTL

SEQ ID NO: 20947 - protein, 7 aa, synthetic construct
PQLQALK

SEQ ID NO: 20948 - protein, 8 aa, synthetic construct
PNAAIIAK

SEQ ID NO: 20949 - protein, 10 aa, synthetic construct
PQVGTQIRTI

SEQ ID NO: 20950 - protein, 9 aa, synthetic construct
AVAPPAPKP

SEQ ID NO: 20951 - protein, 12 aa, synthetic construct
PQVGVPGRVAVN

SEQ ID NO: 20952 - protein, 13 aa, synthetic construct
GPAVRAGAARGLP

SEQ ID NO: 20953 - protein, 8 aa, synthetic construct
RPGGRLKL

SEQ ID NO: 20954 - protein, 9 aa, synthetic construct
RLAPHLTAL

SEQ ID NO: 20955 - protein, 8 aa, synthetic construct
PELRRLLL

SEQ ID NO: 20956 - protein, 8 aa, synthetic construct
RPLARPLL

SEQ ID NO: 20957 - protein, 11 aa, synthetic construct
PRARPGERALL

SEQ ID NO: 20958 - protein, 11 aa, synthetic construct
GSHIQVLNVRL

SEQ ID NO: 20959 - protein, 8 aa, synthetic construct
PRIPLRGI

SEQ ID NO: 20960 - protein, 8 aa, synthetic construct
PRVLAPRL

SEQ ID NO: 20961 - protein, 8 aa, synthetic construct
RPPVARLL

SEQ ID NO: 20962 - protein, 9 aa, synthetic construct
SAPRGPMPL

SEQ ID NO: 20963 - protein, 8 aa, synthetic construct
QAVLRHTI

SEQ ID NO: 20964 - protein, 10 aa, synthetic construct
PSQMSPTVLK

SEQ ID NO: 20965 - protein, 8 aa, synthetic construct
LESPDIKY

SEQ ID NO: 20966 - protein, 8 aa, synthetic construct
PSWVYKEL

SEQ ID NO: 20967 - protein, 9 aa, synthetic construct
SPFQGKLPP

SEQ ID NO: 20968 - protein, 9 aa, synthetic construct
PSVASEPRK

SEQ ID NO: 20969 - protein, 8 aa, synthetic construct
SPQHRSVP

SEQ ID NO: 20970 - protein, 9 aa, synthetic construct
PLSASAHRL

SEQ ID NO: 20971 - protein, 9 aa, synthetic construct
PCVIVIRVL

SEQ ID NO: 20972 - protein, 9 aa, synthetic construct
PSIWLAMYR

SEQ ID NO: 20973 - protein, 10 aa, synthetic construct
AQLSSARLSP

SEQ ID NO: 20974 - protein, 9 aa, synthetic construct
LQALCTKVP

SEQ ID NO: 20975 - protein, 9 aa, synthetic construct
PSSPKRNFF

SEQ ID NO: 20976 - protein, 9 aa, synthetic construct
RVVGGLVAL

SEQ ID NO: 20977 - protein, 9 aa, synthetic construct
ALVARAAVL

SEQ ID NO: 20978 - protein, 8 aa, synthetic construct
QALQYSPY

SEQ ID NO: 20979 - protein, 9 aa, synthetic construct
PTALSTPSF

SEQ ID NO: 20980 - protein, 9 aa, synthetic construct
PDFTSQLNY

SEQ ID NO: 20981 - protein, 9 aa, synthetic construct
VLEEDIGYY

SEQ ID NO: 20982 - protein, 9 aa, synthetic construct
PTFLRALMT

SEQ ID NO: 20983 - protein, 10 aa, synthetic construct
LSRAPGLITP

SEQ ID NO: 20984 - protein, 10 aa, synthetic construct
SEPVAALDPA

SEQ ID NO: 20985 - protein, 10 aa, synthetic construct
PVETARDVLF

SEQ ID NO: 20986 - protein, 8 aa, synthetic construct
EADKPVED

SEQ ID NO: 20987 - protein, 11 aa, synthetic construct
AFLTELAERVP

SEQ ID NO: 20988 - protein, 12 aa, synthetic construct
PTAPLTPLLHGE

SEQ ID NO: 20989 - protein, 10 aa, synthetic construct
EIFKTFYLGK

SEQ ID NO: 20990 - protein, 7 aa, synthetic construct
LQKHNVP

SEQ ID NO: 20991 - protein, 7 aa, synthetic construct
PVLGFFR

SEQ ID NO: 20992 - protein, 7 aa, synthetic construct
PVITWQK

SEQ ID NO: 20993 - protein, 10 aa, synthetic construct
TWVQARHPES

SEQ ID NO: 20994 - protein, 9 aa, synthetic construct
SSSPPAFGF

SEQ ID NO: 20995 - protein, 10 aa, synthetic construct
LSSWYWDLVK

SEQ ID NO: 20996 - protein, 11 aa, synthetic construct
NPVYITYTQPT

SEQ ID NO: 20997 - protein, 8 aa, synthetic construct
DIPSIITK

SEQ ID NO: 20998 - protein, 8 aa, synthetic construct
PVVTEITK

SEQ ID NO: 20999 - protein, 8 aa, synthetic construct
PDSRQQVY

SEQ ID NO: 21000 - protein, 7 aa, synthetic construct
PWWRSKG

SEQ ID NO: 21001 - protein, 9 aa, synthetic construct
IKTLLKAGH

SEQ ID NO: 21002 - protein, 11 aa, synthetic construct
GTCTHKYICYY

SEQ ID NO: 21003 - protein, 13 aa, synthetic construct
TDADIGTNGEFYY

SEQ ID NO: 21004 - protein, 9 aa, synthetic construct
YEDYFSIPY

SEQ ID NO: 21005 - protein, 9 aa, synthetic construct
MIIHFVSLF

SEQ ID NO: 21006 - protein, 8 aa, synthetic construct
PYPPRHLL

SEQ ID NO: 21007 - protein, 11 aa, synthetic construct
IMQVGPSGLLL

SEQ ID NO: 21008 - protein, 11 aa, synthetic construct
MPIFSQHTLLT

SEQ ID NO: 21009 - protein, 12 aa, synthetic construct
MFPILGTGTTIH

SEQ ID NO: 21010 - protein, 11 aa, synthetic construct
LMIMVPTQELL

SEQ ID NO: 21011 - protein, 10 aa, synthetic construct
SQGEEGTEIF

SEQ ID NO: 21012 - protein, 9 aa, synthetic construct
QMSLQGAEF

SEQ ID NO: 21013 - protein, 10 aa, synthetic construct
ISSPQLTDDF

SEQ ID NO: 21014 - protein, 9 aa, synthetic construct
NGMVIPNYS

SEQ ID NO: 21015 - protein, 9 aa, synthetic construct
ANVNLSVYS

SEQ ID NO: 21016 - protein, 14 aa, synthetic construct
AGAAGGPGIGRAAG

SEQ ID NO: 21017 - protein, 9 aa, synthetic construct
LQAVEENIY

SEQ ID NO: 21018 - protein, 9 aa, synthetic construct
LQDQADILY

SEQ ID NO: 21019 - protein, 9 aa, synthetic construct
NEAVNILEL

SEQ ID NO: 21020 - protein, 11 aa, synthetic construct
AGDTAAAAGLD

SEQ ID NO: 21021 - protein, 11 aa, synthetic construct
ASLMVQGEQAF

SEQ ID NO: 21022 - protein, 10 aa, synthetic construct
VMNATAALEF

SEQ ID NO: 21023 - protein, 10 aa, synthetic construct
PSSPRPCIQY

SEQ ID NO: 21024 - protein, 8 aa, synthetic construct
LSRVFLAL

SEQ ID NO: 21025 - protein, 10 aa, synthetic construct
FQAVGEEDEE

SEQ ID NO: 21026 - protein, 8 aa, synthetic construct
QAQELLYT

SEQ ID NO: 21027 - protein, 8 aa, synthetic construct
GQQLFQSF

SEQ ID NO: 21028 - protein, 9 aa, synthetic construct
AQGLPAIFE

SEQ ID NO: 21029 - protein, 9 aa, synthetic construct
AQLTFNQSI

SEQ ID NO: 21030 - protein, 9 aa, synthetic construct
YWGKESPDM

SEQ ID NO: 21031 - protein, 9 aa, synthetic construct
AQDLEMYGV

SEQ ID NO: 21032 - protein, 11 aa, synthetic construct
AQLQESTPKIG

SEQ ID NO: 21033 - protein, 11 aa, synthetic construct
AATVALGISFS

SEQ ID NO: 21034 - protein, 10 aa, synthetic construct
GNGLLSLEEY

SEQ ID NO: 21035 - protein, 9 aa, synthetic construct
LQLALAELY

SEQ ID NO: 21036 - protein, 9 aa, synthetic construct
SKPDLIAHL

SEQ ID NO: 21037 - protein, 10 aa, synthetic construct
DKQPSLLDYT

SEQ ID NO: 21038 - protein, 9 aa, synthetic construct
VSSPKMMLY

SEQ ID NO: 21039 - protein, 9 aa, synthetic construct
VFKHALTSL

SEQ ID NO: 21040 - protein, 9 aa, synthetic construct
GAAPASLGL

SEQ ID NO: 21041 - protein, 10 aa, synthetic construct
AVTRPVSESF

SEQ ID NO: 21042 - protein, 9 aa, synthetic construct
GTNALLMLE

SEQ ID NO: 21043 - protein, 9 aa, synthetic construct
APKTTAEAY

SEQ ID NO: 21044 - protein, 8 aa, synthetic construct
LRCRTYYV

SEQ ID NO: 21045 - protein, 10 aa, synthetic construct
LLGADSATVF

SEQ ID NO: 21046 - protein, 10 aa, synthetic construct
SSPSASVSLY

SEQ ID NO: 21047 - protein, 10 aa, synthetic construct
AASTVARPVF

SEQ ID NO: 21048 - protein, 9 aa, synthetic construct
EGANALVTY

SEQ ID NO: 21049 - protein, 9 aa, synthetic construct
LAANLSIFY

SEQ ID NO: 21050 - protein, 8 aa, synthetic construct
LDQQVEEF

SEQ ID NO: 21051 - protein, 8 aa, synthetic construct
ANLNGIIY

SEQ ID NO: 21052 - protein, 11 aa, synthetic construct
AGQVQVLGGPD

SEQ ID NO: 21053 - protein, 9 aa, synthetic construct
QIGIITPYE

SEQ ID NO: 21054 - protein, 11 aa, synthetic construct
CPSQQKASPAP

SEQ ID NO: 21055 - protein, 9 aa, synthetic construct
VAQGLEPSF

SEQ ID NO: 21056 - protein, 12 aa, synthetic construct
AGASAGSNGSNY

SEQ ID NO: 21057 - protein, 10 aa, synthetic construct
AQAYDQAPPS

SEQ ID NO: 21058 - protein, 10 aa, synthetic construct
YQAYPEYLIT

SEQ ID NO: 21059 - protein, 9 aa, synthetic construct
VSLFEGQVF

SEQ ID NO: 21060 - protein, 8 aa, synthetic construct
CQPLVHIR

SEQ ID NO: 21061 - protein, 8 aa, synthetic construct
KYNMQFLI

SEQ ID NO: 21062 - protein, 9 aa, synthetic construct
QDIIKEVKF

SEQ ID NO: 21063 - protein, 10 aa, synthetic construct
AVGAEAAAIM

SEQ ID NO: 21064 - protein, 10 aa, synthetic construct
AQDAFFPGSS

SEQ ID NO: 21065 - protein, 10 aa, synthetic construct
SSGPSLALAT

SEQ ID NO: 21066 - protein, 9 aa, synthetic construct
QELWYLGSW

SEQ ID NO: 21067 - protein, 10 aa, synthetic construct
AEFGAEFKNI

SEQ ID NO: 21068 - protein, 8 aa, synthetic construct
EQFFQKLR

SEQ ID NO: 21069 - protein, 10 aa, synthetic construct
QRFGEGLLEA

SEQ ID NO: 21070 - protein, 10 aa, synthetic construct
EGAFAYIVNY

SEQ ID NO: 21071 - protein, 10 aa, synthetic construct
SYGPRLGLAA

SEQ ID NO: 21072 - protein, 9 aa, synthetic construct
IHLQEQQLN

SEQ ID NO: 21073 - protein, 10 aa, synthetic construct
AEGIAPTLAP

SEQ ID NO: 21074 - protein, 10 aa, synthetic construct
AGHSLELIEP

SEQ ID NO: 21075 - protein, 10 aa, synthetic construct
MGLSLPALPL

SEQ ID NO: 21076 - protein, 8 aa, synthetic construct
ELQKLEVV

SEQ ID NO: 21077 - protein, 9 aa, synthetic construct
QQEIPLILY

SEQ ID NO: 21078 - protein, 10 aa, synthetic construct
DAALDFKLAA

SEQ ID NO: 21079 - protein, 10 aa, synthetic construct
QEAKTEPFTQ

SEQ ID NO: 21080 - protein, 8 aa, synthetic construct
VTQELPLK

SEQ ID NO: 21081 - protein, 10 aa, synthetic construct
TPGTALPEPA

SEQ ID NO: 21082 - protein, 9 aa, synthetic construct
QDLEIPAVP

SEQ ID NO: 21083 - protein, 8 aa, synthetic construct
QYEFKEAA

SEQ ID NO: 21084 - protein, 9 aa, synthetic construct
PYRTCFTAG

SEQ ID NO: 21085 - protein, 10 aa, synthetic construct
QQLKDSQADV

SEQ ID NO: 21086 - protein, 9 aa, synthetic construct
EQYGQYALA

SEQ ID NO: 21087 - protein, 9 aa, synthetic construct
CVFTEVMWI

SEQ ID NO: 21088 - protein, 10 aa, synthetic construct
GDIDAFLKVP

SEQ ID NO: 21089 - protein, 15 aa, synthetic construct
AEGAGGPEGKAVAGA

SEQ ID NO: 21090 - protein, 9 aa, synthetic construct
LSMTATFLQ

SEQ ID NO: 21091 - protein, 9 aa, synthetic construct
AFGDVTAHL

SEQ ID NO: 21092 - protein, 8 aa, synthetic construct
LMKLKEHI

SEQ ID NO: 21093 - protein, 11 aa, synthetic construct
GAIFGGFKSKE

SEQ ID NO: 21094 - protein, 9 aa, synthetic construct
FQLVRDVVL

SEQ ID NO: 21095 - protein, 9 aa, synthetic construct
VQGPPTPLV

SEQ ID NO: 21096 - protein, 9 aa, synthetic construct
QRAITGASL

SEQ ID NO: 21097 - protein, 9 aa, synthetic construct
TVQDTRCVY

SEQ ID NO: 21098 - protein, 9 aa, synthetic construct
RRDSGSSRN

SEQ ID NO: 21099 - protein, 8 aa, synthetic construct
WMLLTNVV

SEQ ID NO: 21100 - protein, 9 aa, synthetic construct
GFGSISRVF

SEQ ID NO: 21101 - protein, 8 aa, synthetic construct
NFSSLRAI

SEQ ID NO: 21102 - protein, 9 aa, synthetic construct
VAQIFGLEL

SEQ ID NO: 21103 - protein, 8 aa, synthetic construct
LQDNALRA

SEQ ID NO: 21104 - protein, 9 aa, synthetic construct
IQFKVNLVL

SEQ ID NO: 21105 - protein, 12 aa, synthetic construct
FINKLTGEDVFG

SEQ ID NO: 21106 - protein, 10 aa, synthetic construct
QLFVVVFAVL

SEQ ID NO: 21107 - protein, 8 aa, synthetic construct
QIGKTKVF

SEQ ID NO: 21108 - protein, 8 aa, synthetic construct
QIKDFREK

SEQ ID NO: 21109 - protein, 10 aa, synthetic construct
GALDGIIYYL

SEQ ID NO: 21110 - protein, 9 aa, synthetic construct
AVALIRKLI

SEQ ID NO: 21111 - protein, 10 aa, synthetic construct
AGLTPEIQKI

SEQ ID NO: 21112 - protein, 11 aa, synthetic construct
ALGLPGALTIY

SEQ ID NO: 21113 - protein, 9 aa, synthetic construct
QLSEAVLLK

SEQ ID NO: 21114 - protein, 9 aa, synthetic construct
YFNARGRME

SEQ ID NO: 21115 - protein, 10 aa, synthetic construct
TAGLADLLLY

SEQ ID NO: 21116 - protein, 11 aa, synthetic construct
VAAYLDNLQAF

SEQ ID NO: 21117 - protein, 8 aa, synthetic construct
PGSFPKQL

SEQ ID NO: 21118 - protein, 8 aa, synthetic construct
QKAEKEMK

SEQ ID NO: 21119 - protein, 8 aa, synthetic construct
QKEQENAK

SEQ ID NO: 21120 - protein, 9 aa, synthetic construct
GQKTSVSVL

SEQ ID NO: 21121 - protein, 8 aa, synthetic construct
LIIWKTVL

SEQ ID NO: 21122 - protein, 9 aa, synthetic construct
KTYDRPLIL

SEQ ID NO: 21123 - protein, 11 aa, synthetic construct
VAAGKGDSDLM

SEQ ID NO: 21124 - protein, 11 aa, synthetic construct
LTGQANGSLAM

SEQ ID NO: 21125 - protein, 11 aa, synthetic construct
IMAELQGSSGA

SEQ ID NO: 21126 - protein, 10 aa, synthetic construct
VNGVTDQSPF

SEQ ID NO: 21127 - protein, 9 aa, synthetic construct
AIQQQQNQL

SEQ ID NO: 21128 - protein, 12 aa, synthetic construct
AAVAGAPRVNGS

SEQ ID NO: 21129 - protein, 9 aa, synthetic construct
LENDIKVEI

SEQ ID NO: 21130 - protein, 9 aa, synthetic construct
DMDIHKDLY

SEQ ID NO: 21131 - protein, 10 aa, synthetic construct
RKMAQADQFY

SEQ ID NO: 21132 - protein, 10 aa, synthetic construct
MCKHKVLSDY

SEQ ID NO: 21133 - protein, 10 aa, synthetic construct
AGLQATRWAL

SEQ ID NO: 21134 - protein, 9 aa, synthetic construct
SRNLMLIQL

SEQ ID NO: 21135 - protein, 10 aa, synthetic construct
LLQDSGRILQ

SEQ ID NO: 21136 - protein, 11 aa, synthetic construct
QLLGWVSVAGI

SEQ ID NO: 21137 - protein, 10 aa, synthetic construct
ELTGTLPAEY

SEQ ID NO: 21138 - protein, 9 aa, synthetic construct
IERIGYKVT

SEQ ID NO: 21139 - protein, 9 aa, synthetic construct
LKAGELRLQ

SEQ ID NO: 21140 - protein, 7 aa, synthetic construct
QLKFWKI

SEQ ID NO: 21141 - protein, 9 aa, synthetic construct
QLVEQVEQI

SEQ ID NO: 21142 - protein, 9 aa, synthetic construct
KVLDGSPIE

SEQ ID NO: 21143 - protein, 9 aa, synthetic construct
QITGDRAVY

SEQ ID NO: 21144 - protein, 11 aa, synthetic construct
PGAQLLPALAL

SEQ ID NO: 21145 - protein, 11 aa, synthetic construct
LRVAAPGAGLQ

SEQ ID NO: 21146 - protein, 9 aa, synthetic construct
QLSLSTVRL

SEQ ID NO: 21147 - protein, 8 aa, synthetic construct
NLIALKVL

SEQ ID NO: 21148 - protein, 9 aa, synthetic construct
QLVVELKDI

SEQ ID NO: 21149 - protein, 11 aa, synthetic construct
AAVVVEISGLV

SEQ ID NO: 21150 - protein, 10 aa, synthetic construct
LAAAETTVEL

SEQ ID NO: 21151 - protein, 10 aa, synthetic construct
SLSVFNGLVY

SEQ ID NO: 21152 - protein, 9 aa, synthetic construct
LQNITTDTR

SEQ ID NO: 21153 - protein, 9 aa, synthetic construct
FKEVSDSLL

SEQ ID NO: 21154 - protein, 10 aa, synthetic construct
EDFAKAHRQL

SEQ ID NO: 21155 - protein, 10 aa, synthetic construct
LENAMAVLAQ

SEQ ID NO: 21156 - protein, 11 aa, synthetic construct
LGSQMEVAIGA

SEQ ID NO: 21157 - protein, 10 aa, synthetic construct
AEAWDPGLVV

SEQ ID NO: 21158 - protein, 9 aa, synthetic construct
LEHNPNLLF

SEQ ID NO: 21159 - protein, 9 aa, synthetic construct
KMDRVLLVI

SEQ ID NO: 21160 - protein, 8 aa, synthetic construct
YLVQPTMV

SEQ ID NO: 21161 - protein, 9 aa, synthetic construct
GGLQREQVI

SEQ ID NO: 21162 - protein, 9 aa, synthetic construct
MGQLKVNTL

SEQ ID NO: 21163 - protein, 8 aa, synthetic construct
AQPLCEEL

SEQ ID NO: 21164 - protein, 13 aa, synthetic construct
PQAGLAGPGPAGY

SEQ ID NO: 21165 - protein, 10 aa, synthetic construct
PALLQDPAMY

SEQ ID NO: 21166 - protein, 9 aa, synthetic construct
VVGPLQPDF

SEQ ID NO: 21167 - protein, 10 aa, synthetic construct
GAPSPALPHL

SEQ ID NO: 21168 - protein, 9 aa, synthetic construct
QWLELFSVY

SEQ ID NO: 21169 - protein, 12 aa, synthetic construct
DSAAMEIQTTQP

SEQ ID NO: 21170 - protein, 8 aa, synthetic construct
SWEKAVSL

SEQ ID NO: 21171 - protein, 9 aa, synthetic construct
SSNKNAVSI

SEQ ID NO: 21172 - protein, 11 aa, synthetic construct
DESNLPEISEY

SEQ ID NO: 21173 - protein, 12 aa, synthetic construct
TPTIVPSSASAY

SEQ ID NO: 21174 - protein, 10 aa, synthetic construct
AVDPLGNYMV

SEQ ID NO: 21175 - protein, 10 aa, synthetic construct
SSFQYLIVAI

SEQ ID NO: 21176 - protein, 9 aa, synthetic construct
AGPPENVLP

SEQ ID NO: 21177 - protein, 9 aa, synthetic construct
VERDTLSDF

SEQ ID NO: 21178 - protein, 12 aa, synthetic construct
AITEWLSKGHGE

SEQ ID NO: 21179 - protein, 10 aa, synthetic construct
MKPFRPDLFL

SEQ ID NO: 21180 - protein, 10 aa, synthetic construct
WLSGGVLGEF

SEQ ID NO: 21181 - protein, 10 aa, synthetic construct
AMAVERALAI

SEQ ID NO: 21182 - protein, 10 aa, synthetic construct
EGQAENPPDY

SEQ ID NO: 21183 - protein, 9 aa, synthetic construct
SKPNGIIQY

SEQ ID NO: 21184 - protein, 9 aa, synthetic construct
AVNPIIYNL

SEQ ID NO: 21185 - protein, 9 aa, synthetic construct
QLPAFQEGI

SEQ ID NO: 21186 - protein, 9 aa, synthetic construct
FRESAPGAL

SEQ ID NO: 21187 - protein, 9 aa, synthetic construct
ELSRLRLQL

SEQ ID NO: 21188 - protein, 10 aa, synthetic construct
SSLKAQSSYF

SEQ ID NO: 21189 - protein, 10 aa, synthetic construct
QLILMLRSSS

SEQ ID NO: 21190 - protein, 10 aa, synthetic construct
PITGRALEPY

SEQ ID NO: 21191 - protein, 10 aa, synthetic construct
AGQLPAVVAY

SEQ ID NO: 21192 - protein, 11 aa, synthetic construct
VPAAALGPSLT

SEQ ID NO: 21193 - protein, 9 aa, synthetic construct
RMDPPLLTY

SEQ ID NO: 21194 - protein, 12 aa, synthetic construct
GEGTPRAHFLPS

SEQ ID NO: 21195 - protein, 10 aa, synthetic construct
QIFYSLGVGF

SEQ ID NO: 21196 - protein, 8 aa, synthetic construct
PQLRELVL

SEQ ID NO: 21197 - protein, 10 aa, synthetic construct
GDGQNLGQEY

SEQ ID NO: 21198 - protein, 10 aa, synthetic construct
KGNSMGVLEF

SEQ ID NO: 21199 - protein, 9 aa, synthetic construct
IPSPLERMV

SEQ ID NO: 21200 - protein, 8 aa, synthetic construct
PQNFYCIH

SEQ ID NO: 21201 - protein, 9 aa, synthetic construct
QLAQPTLMI

SEQ ID NO: 21202 - protein, 10 aa, synthetic construct
GKAFSVSSAL

SEQ ID NO: 21203 - protein, 9 aa, synthetic construct
QPQTLQHHI

SEQ ID NO: 21204 - protein, 12 aa, synthetic construct
AHSVVSVSCTLY

SEQ ID NO: 21205 - protein, 10 aa, synthetic construct
NPVAIPEGQF

SEQ ID NO: 21206 - protein, 11 aa, synthetic construct
PHLHQGPGATM

SEQ ID NO: 21207 - protein, 9 aa, synthetic construct
RALEDRNSV

SEQ ID NO: 21208 - protein, 9 aa, synthetic construct
TQGPLLLSL

SEQ ID NO: 21209 - protein, 9 aa, synthetic construct
LENNGLVGY

SEQ ID NO: 21210 - protein, 10 aa, synthetic construct
HVPTANMLVM

SEQ ID NO: 21211 - protein, 10 aa, synthetic construct
SQEPIDPLVM

SEQ ID NO: 21212 - protein, 10 aa, synthetic construct
QNPDKEKVIY

SEQ ID NO: 21213 - protein, 9 aa, synthetic construct
QPTQDVISY

SEQ ID NO: 21214 - protein, 10 aa, synthetic construct
ALMQTPLPAG

SEQ ID NO: 21215 - protein, 9 aa, synthetic construct
SPPQLVPLA

SEQ ID NO: 21216 - protein, 8 aa, synthetic construct
QPPSAILI

SEQ ID NO: 21217 - protein, 8 aa, synthetic construct
IFLEKFFL

SEQ ID NO: 21218 - protein, 10 aa, synthetic construct
ELVVAKAGVY

SEQ ID NO: 21219 - protein, 8 aa, synthetic construct
TMQLTQIL

SEQ ID NO: 21220 - protein, 10 aa, synthetic construct
QVGELCGKYV

SEQ ID NO: 21221 - protein, 11 aa, synthetic construct
AWVNDSLHLNY

SEQ ID NO: 21222 - protein, 10 aa, synthetic construct
PGIEGPIGFP

SEQ ID NO: 21223 - protein, 9 aa, synthetic construct
QPFIPSKSM

SEQ ID NO: 21224 - protein, 10 aa, synthetic construct
PQVQGHMEAA

SEQ ID NO: 21225 - protein, 8 aa, synthetic construct
QVPRSPVI

SEQ ID NO: 21226 - protein, 10 aa, synthetic construct
ITNPIMPGGY

SEQ ID NO: 21227 - protein, 10 aa, synthetic construct
QGNMQVLVTY

SEQ ID NO: 21228 - protein, 9 aa, synthetic construct
TKSGFPEVL

SEQ ID NO: 21229 - protein, 9 aa, synthetic construct
PNGWQVPAY

SEQ ID NO: 21230 - protein, 11 aa, synthetic construct
QVTMPAGQDLA

SEQ ID NO: 21231 - protein, 8 aa, synthetic construct
MQKCVSLV

SEQ ID NO: 21232 - protein, 9 aa, synthetic construct
QQLQGLAVT

SEQ ID NO: 21233 - protein, 9 aa, synthetic construct
QLQKQQILL

SEQ ID NO: 21234 - protein, 8 aa, synthetic construct
QQLRVQEV

SEQ ID NO: 21235 - protein, 9 aa, synthetic construct
RFKWSDFSL

SEQ ID NO: 21236 - protein, 9 aa, synthetic construct
SDLERVITK

SEQ ID NO: 21237 - protein, 10 aa, synthetic construct
GQSPKLRHLV

SEQ ID NO: 21238 - protein, 8 aa, synthetic construct
QQLVLLRS

SEQ ID NO: 21239 - protein, 13 aa, synthetic construct
QGALPGSAGTWGL

SEQ ID NO: 21240 - protein, 11 aa, synthetic construct
AQGLLESEDRP

SEQ ID NO: 21241 - protein, 9 aa, synthetic construct
PRDSGVVPV

SEQ ID NO: 21242 - protein, 11 aa, synthetic construct
LPPPRPGAQVF

SEQ ID NO: 21243 - protein, 10 aa, synthetic construct
VVGRNLVLVT

SEQ ID NO: 21244 - protein, 11 aa, synthetic construct
GVGLGLARVSV

SEQ ID NO: 21245 - protein, 8 aa, synthetic construct
QNLLIQVV

SEQ ID NO: 21246 - protein, 10 aa, synthetic construct
GTKSMAALTV

SEQ ID NO: 21247 - protein, 11 aa, synthetic construct
LLPMAQRGSKQ

SEQ ID NO: 21248 - protein, 9 aa, synthetic construct
SRIPKLQQL

SEQ ID NO: 21249 - protein, 10 aa, synthetic construct
DVPLDDLTFT

SEQ ID NO: 21250 - protein, 10 aa, synthetic construct
YSTVLCSYYN

SEQ ID NO: 21251 - protein, 10 aa, synthetic construct
SHSEPRSCKL

SEQ ID NO: 21252 - protein, 10 aa, synthetic construct
RALMLTSQYL

SEQ ID NO: 21253 - protein, 10 aa, synthetic construct
IKCVTRIQAY

SEQ ID NO: 21254 - protein, 9 aa, synthetic construct
VIKLCDFGF

SEQ ID NO: 21255 - protein, 9 aa, synthetic construct
HIIHIDFGF

SEQ ID NO: 21256 - protein, 10 aa, synthetic construct
VIMVDRHFVN

SEQ ID NO: 21257 - protein, 10 aa, synthetic construct
ERRRSQQLGF

SEQ ID NO: 21258 - protein, 12 aa, synthetic construct
QVAEDLVANGAL

SEQ ID NO: 21259 - protein, 10 aa, synthetic construct
LGRGAFLVRR

SEQ ID NO: 21260 - protein, 9 aa, synthetic construct
RNHGLFVIR

SEQ ID NO: 21261 - protein, 10 aa, synthetic construct
RGSAHLVSFR

SEQ ID NO: 21262 - protein, 11 aa, synthetic construct
IQHLERIGKKL

SEQ ID NO: 21263 - protein, 9 aa, synthetic construct
SKLHFVHCF

SEQ ID NO: 21264 - protein, 9 aa, synthetic construct
CRREVVQFL

SEQ ID NO: 21265 - protein, 9 aa, synthetic construct
LRRDLRFLS

SEQ ID NO: 21266 - protein, 8 aa, synthetic construct
IIRRDLGF

SEQ ID NO: 21267 - protein, 10 aa, synthetic construct
LMNLQATRFF

SEQ ID NO: 21268 - protein, 10 aa, synthetic construct
QMVIKVSKQL

SEQ ID NO: 21269 - protein, 10 aa, synthetic construct
QRKLKAMSLL

SEQ ID NO: 21270 - protein, 10 aa, synthetic construct
ARIGAIHSLI

SEQ ID NO: 21271 - protein, 9 aa, synthetic construct
RETSKRNKI

SEQ ID NO: 21272 - protein, 11 aa, synthetic construct
QPRPGPPSLCL

SEQ ID NO: 21273 - protein, 14 aa, synthetic construct
TIFAGGAAAADGRL

SEQ ID NO: 21274 - protein, 11 aa, synthetic construct
LRGGPHDGVTI

SEQ ID NO: 21275 - protein, 10 aa, synthetic construct
KLAQMALIAY

SEQ ID NO: 21276 - protein, 10 aa, synthetic construct
INGSFRALGF

SEQ ID NO: 21277 - protein, 9 aa, synthetic construct
SAHGVKLVL

SEQ ID NO: 21278 - protein, 11 aa, synthetic construct
GRAPSLAAGLL

SEQ ID NO: 21279 - protein, 9 aa, synthetic construct
VNVRDQFAY

SEQ ID NO: 21280 - protein, 10 aa, synthetic construct
LLTSTDFLYF

SEQ ID NO: 21281 - protein, 9 aa, synthetic construct
LCKNCHHVI

SEQ ID NO: 21282 - protein, 10 aa, synthetic construct
ISALRGLLHI

SEQ ID NO: 21283 - protein, 10 aa, synthetic construct
LMYTKLFVGF

SEQ ID NO: 21284 - protein, 10 aa, synthetic construct
VIGSKFDQYM

SEQ ID NO: 21285 - protein, 10 aa, synthetic construct
GIQSLGSPIK

SEQ ID NO: 21286 - protein, 9 aa, synthetic construct
RMVRGVVHV

SEQ ID NO: 21287 - protein, 10 aa, synthetic construct
VLSRAASLVH

SEQ ID NO: 21288 - protein, 9 aa, synthetic construct
ILGKWETEF

SEQ ID NO: 21289 - protein, 9 aa, synthetic construct
GVINILLRF

SEQ ID NO: 21290 - protein, 9 aa, synthetic construct
RVIPQDQSF

SEQ ID NO: 21291 - protein, 10 aa, synthetic construct
ALRGVSFFDY

SEQ ID NO: 21292 - protein, 13 aa, synthetic construct
FVPPRAPAACAPE

SEQ ID NO: 21293 - protein, 11 aa, synthetic construct
QVCLGLAGTSW

SEQ ID NO: 21294 - protein, 11 aa, synthetic construct
DGRTYGVRLQV

SEQ ID NO: 21295 - protein, 9 aa, synthetic construct
KVFPIRLML

SEQ ID NO: 21296 - protein, 10 aa, synthetic construct
LIFMPGTIQM

SEQ ID NO: 21297 - protein, 10 aa, synthetic construct
SSLQNYLVTL

SEQ ID NO: 21298 - protein, 9 aa, synthetic construct
SENSSFYYY

SEQ ID NO: 21299 - protein, 11 aa, synthetic construct
NGTASSFCLDS

SEQ ID NO: 21300 - protein, 9 aa, synthetic construct
MESPKSSLY

SEQ ID NO: 21301 - protein, 9 aa, synthetic construct
PLELCTARD

SEQ ID NO: 21302 - protein, 8 aa, synthetic construct
TKYSVYIY

SEQ ID NO: 21303 - protein, 10 aa, synthetic construct
NAGSELAVLY

SEQ ID NO: 21304 - protein, 8 aa, synthetic construct
KAEKIKVI

SEQ ID NO: 21305 - protein, 11 aa, synthetic construct
EKENYLTAGLT

SEQ ID NO: 21306 - protein, 8 aa, synthetic construct
LTGQTPVV

SEQ ID NO: 21307 - protein, 10 aa, synthetic construct
GASPELQLHP

SEQ ID NO: 21308 - protein, 10 aa, synthetic construct
AGSINQNGSL

SEQ ID NO: 21309 - protein, 9 aa, synthetic construct
NTEMLGPSL

SEQ ID NO: 21310 - protein, 9 aa, synthetic construct
QSWSAIKAI

SEQ ID NO: 21311 - protein, 8 aa, synthetic construct
QSITRLPI

SEQ ID NO: 21312 - protein, 9 aa, synthetic construct
QSVMWNVIL

SEQ ID NO: 21313 - protein, 9 aa, synthetic construct
NTYPLPSSL

SEQ ID NO: 21314 - protein, 9 aa, synthetic construct
LMERKNLSY

SEQ ID NO: 21315 - protein, 11 aa, synthetic construct
YSLAENTIQGA

SEQ ID NO: 21316 - protein, 11 aa, synthetic construct
DQTKPGSLSFS

SEQ ID NO: 21317 - protein, 10 aa, synthetic construct
TGADLLTPGS

SEQ ID NO: 21318 - protein, 9 aa, synthetic construct
QTLDISSPA

SEQ ID NO: 21319 - protein, 8 aa, synthetic construct
QTDIVDLQ

SEQ ID NO: 21320 - protein, 9 aa, synthetic construct
TQVTDLAPS

SEQ ID NO: 21321 - protein, 9 aa, synthetic construct
EKSKLQEIY

SEQ ID NO: 21322 - protein, 9 aa, synthetic construct
EKQELKSIY

SEQ ID NO: 21323 - protein, 11 aa, synthetic construct
INASSIGLSLY

SEQ ID NO: 21324 - protein, 9 aa, synthetic construct
LSQDQYLVY

SEQ ID NO: 21325 - protein, 9 aa, synthetic construct
GEQLDILSV

SEQ ID NO: 21326 - protein, 9 aa, synthetic construct
EELAAQLQY

SEQ ID NO: 21327 - protein, 13 aa, synthetic construct
GTGSGQSSGFGQY

SEQ ID NO: 21328 - protein, 9 aa, synthetic construct
INSDTGILY

SEQ ID NO: 21329 - protein, 9 aa, synthetic construct
DFNENDLFY

SEQ ID NO: 21330 - protein, 9 aa, synthetic construct
MKISESSNF

SEQ ID NO: 21331 - protein, 9 aa, synthetic construct
FFIPTSVDL

SEQ ID NO: 21332 - protein, 13 aa, synthetic construct
GATPNGEAAKSPP

SEQ ID NO: 21333 - protein, 10 aa, synthetic construct
GATGKMILLL

SEQ ID NO: 21334 - protein, 9 aa, synthetic construct
GIEQISKVY

SEQ ID NO: 21335 - protein, 9 aa, synthetic construct
NIAMLTVLH

SEQ ID NO: 21336 - protein, 10 aa, synthetic construct
TSQGTVPTAL

SEQ ID NO: 21337 - protein, 10 aa, synthetic construct
VGAPFTGSSL

SEQ ID NO: 21338 - protein, 10 aa, synthetic construct
AGLSARVLLL

SEQ ID NO: 21339 - protein, 9 aa, synthetic construct
AVQVVLSAF

SEQ ID NO: 21340 - protein, 9 aa, synthetic construct
KFNGGSLYY

SEQ ID NO: 21341 - protein, 12 aa, synthetic construct
LYVIGGSNNDAG

SEQ ID NO: 21342 - protein, 9 aa, synthetic construct
IQWDVDTIY

SEQ ID NO: 21343 - protein, 12 aa, synthetic construct
PTGSLEMGPLTF

SEQ ID NO: 21344 - protein, 9 aa, synthetic construct
FQYDEAVAQ

SEQ ID NO: 21345 - protein, 10 aa, synthetic construct
AHPLLFLLCL

SEQ ID NO: 21346 - protein, 10 aa, synthetic construct
RDTASSILTY

SEQ ID NO: 21347 - protein, 11 aa, synthetic construct
FKEAMRIGAEV

SEQ ID NO: 21348 - protein, 11 aa, synthetic construct
QPPEDIKALSW

SEQ ID NO: 21349 - protein, 10 aa, synthetic construct
GLFSPHVRAL

SEQ ID NO: 21350 - protein, 9 aa, synthetic construct
RRMQGKSCL

SEQ ID NO: 21351 - protein, 9 aa, synthetic construct
LNDWETPVV

SEQ ID NO: 21352 - protein, 9 aa, synthetic construct
LMMESLIIF

SEQ ID NO: 21353 - protein, 9 aa, synthetic construct
LTVVQSPFE

SEQ ID NO: 21354 - protein, 9 aa, synthetic construct
VSAMPAIVY

SEQ ID NO: 21355 - protein, 9 aa, synthetic construct
SLKESNMTY

SEQ ID NO: 21356 - protein, 8 aa, synthetic construct
LCSRLLEY

SEQ ID NO: 21357 - protein, 9 aa, synthetic construct
WTAISALEY

SEQ ID NO: 21358 - protein, 9 aa, synthetic construct
AARPSLRHL

SEQ ID NO: 21359 - protein, 11 aa, synthetic construct
GPPPPYHDALY

SEQ ID NO: 21360 - protein, 10 aa, synthetic construct
PLEARDLLSF

SEQ ID NO: 21361 - protein, 9 aa, synthetic construct
RILAEYESM

SEQ ID NO: 21362 - protein, 9 aa, synthetic construct
KQALVLVEF

SEQ ID NO: 21363 - protein, 8 aa, synthetic construct
RALDVIWK

SEQ ID NO: 21364 - protein, 9 aa, synthetic construct
PAERVLLLE

SEQ ID NO: 21365 - protein, 10 aa, synthetic construct
AHTTPWGLFY

SEQ ID NO: 21366 - protein, 9 aa, synthetic construct
IFRSFAHGL

SEQ ID NO: 21367 - protein, 10 aa, synthetic construct
AHEKICMLTF

SEQ ID NO: 21368 - protein, 10 aa, synthetic construct
RGHGPAEWEL

SEQ ID NO: 21369 - protein, 9 aa, synthetic construct
QQQVERHFT

SEQ ID NO: 21370 - protein, 11 aa, synthetic construct
ATGHTPPLAEA

SEQ ID NO: 21371 - protein, 9 aa, synthetic construct
TPSAREIKP

SEQ ID NO: 21372 - protein, 9 aa, synthetic construct
SKKCETKSI

SEQ ID NO: 21373 - protein, 10 aa, synthetic construct
TVEKEMKSLA

SEQ ID NO: 21374 - protein, 11 aa, synthetic construct
VFSANSVGQLS

SEQ ID NO: 21375 - protein, 9 aa, synthetic construct
RETGEFTQL

SEQ ID NO: 21376 - protein, 10 aa, synthetic construct
AVYNYPEGAA

SEQ ID NO: 21377 - protein, 9 aa, synthetic construct
FRQLNTAIA

SEQ ID NO: 21378 - protein, 9 aa, synthetic construct
AAWDKFLTG

SEQ ID NO: 21379 - protein, 9 aa, synthetic construct
QKGWMVLEY

SEQ ID NO: 21380 - protein, 12 aa, synthetic construct
MLSKSSSNPKAW

SEQ ID NO: 21381 - protein, 12 aa, synthetic construct
ADSKATAPAYKP

SEQ ID NO: 21382 - protein, 10 aa, synthetic construct
LRDFMSVELT

SEQ ID NO: 21383 - protein, 11 aa, synthetic construct
QKACLNGSNKL

SEQ ID NO: 21384 - protein, 13 aa, synthetic construct
ISSALHLGGMPSV

SEQ ID NO: 21385 - protein, 11 aa, synthetic construct
AENGPHLLVEA

SEQ ID NO: 21386 - protein, 10 aa, synthetic construct
AHQLWLSVEA

SEQ ID NO: 21387 - protein, 15 aa, synthetic construct
ALGEEAEGGGGGRIS

SEQ ID NO: 21388 - protein, 12 aa, synthetic construct
PHTSNSASLQGI

SEQ ID NO: 21389 - protein, 9 aa, synthetic construct
MYVQPFRIV

SEQ ID NO: 21390 - protein, 10 aa, synthetic construct
ESPLGHFESY

SEQ ID NO: 21391 - protein, 10 aa, synthetic construct
IAYYWSEFSI

SEQ ID NO: 21392 - protein, 10 aa, synthetic construct
GHLAEPALSA

SEQ ID NO: 21393 - protein, 11 aa, synthetic construct
FSGQIANLTVA

SEQ ID NO: 21394 - protein, 10 aa, synthetic construct
LNGKADATLI

SEQ ID NO: 21395 - protein, 12 aa, synthetic construct
EARGAALAGSEA

SEQ ID NO: 21396 - protein, 10 aa, synthetic construct
GLHFPEGLVA

SEQ ID NO: 21397 - protein, 9 aa, synthetic construct
RLDFSPLLP

SEQ ID NO: 21398 - protein, 10 aa, synthetic construct
FDNRNTSVMP

SEQ ID NO: 21399 - protein, 11 aa, synthetic construct
YPAACNALETL

SEQ ID NO: 21400 - protein, 11 aa, synthetic construct
ANMEDKRETLP

SEQ ID NO: 21401 - protein, 11 aa, synthetic construct
GSAVEDSLPAP

SEQ ID NO: 21402 - protein, 9 aa, synthetic construct
RQLWDGTGV

SEQ ID NO: 21403 - protein, 9 aa, synthetic construct
YWAHFKETL

SEQ ID NO: 21404 - protein, 10 aa, synthetic construct
YIEVRDGETL

SEQ ID NO: 21405 - protein, 11 aa, synthetic construct
QVMPLQFSKEL

SEQ ID NO: 21406 - protein, 11 aa, synthetic construct
EGLLEWLPVLF

SEQ ID NO: 21407 - protein, 10 aa, synthetic construct
NYLREIIGVV

SEQ ID NO: 21408 - protein, 14 aa, synthetic construct
GLGVSGAGGALALG

SEQ ID NO: 21409 - protein, 11 aa, synthetic construct
TEIRGFNEEEI

SEQ ID NO: 21410 - protein, 8 aa, synthetic construct
LERHVIQA

SEQ ID NO: 21411 - protein, 10 aa, synthetic construct
TPRLCAQLSA

SEQ ID NO: 21412 - protein, 9 aa, synthetic construct
KIMDRFEEV

SEQ ID NO: 21413 - protein, 11 aa, synthetic construct
NVSSPVNLVSA

SEQ ID NO: 21414 - protein, 12 aa, synthetic construct
PGGARPAAVVVA

SEQ ID NO: 21415 - protein, 9 aa, synthetic construct
VRRRGLGRA

SEQ ID NO: 21416 - protein, 13 aa, synthetic construct
AVGKVAVGVAVAA

SEQ ID NO: 21417 - protein, 10 aa, synthetic construct
AGVWTKTKTG

SEQ ID NO: 21418 - protein, 9 aa, synthetic construct
AFTRAYNKE

SEQ ID NO: 21419 - protein, 10 aa, synthetic construct
EKARQELQEA

SEQ ID NO: 21420 - protein, 10 aa, synthetic construct
GCQSSVCVPV

SEQ ID NO: 21421 - protein, 10 aa, synthetic construct
SFSDHQSFAV

SEQ ID NO: 21422 - protein, 11 aa, synthetic construct
VRCSCWSLGEA

SEQ ID NO: 21423 - protein, 11 aa, synthetic construct
KMQMSDLHLLM

SEQ ID NO: 21424 - protein, 14 aa, synthetic construct
GGSSSTPTPQALYP

SEQ ID NO: 21425 - protein, 11 aa, synthetic construct
TVGGVMTKLIP

SEQ ID NO: 21426 - protein, 9 aa, synthetic construct
RLNESHLLP

SEQ ID NO: 21427 - protein, 9 aa, synthetic construct
EIVYNKLLP

SEQ ID NO: 21428 - protein, 11 aa, synthetic construct
PHAHGLIPPPR

SEQ ID NO: 21429 - protein, 11 aa, synthetic construct
LVQGSAQKDLL

SEQ ID NO: 21430 - protein, 10 aa, synthetic construct
VLWMRDRVYA

SEQ ID NO: 21431 - protein, 11 aa, synthetic construct
LPATPFKQPVL

SEQ ID NO: 21432 - protein, 10 aa, synthetic construct
LGPQKALNQA

SEQ ID NO: 21433 - protein, 11 aa, synthetic construct
LPAEYKSLKNA

SEQ ID NO: 21434 - protein, 9 aa, synthetic construct
VERDLTPLI

SEQ ID NO: 21435 - protein, 10 aa, synthetic construct
ITGNFKSLQA

SEQ ID NO: 21436 - protein, 12 aa, synthetic construct
AMDGALGLSGKW

SEQ ID NO: 21437 - protein, 11 aa, synthetic construct
PSSEHDVLKEA

SEQ ID NO: 21438 - protein, 13 aa, synthetic construct
MSSQQNVMGTTEI

SEQ ID NO: 21439 - protein, 11 aa, synthetic construct
QILHSEEFLSF

SEQ ID NO: 21440 - protein, 12 aa, synthetic construct
DSKVTGTNWLTP

SEQ ID NO: 21441 - protein, 10 aa, synthetic construct
KMSEIFPLTE

SEQ ID NO: 21442 - protein, 12 aa, synthetic construct
YSLSLATSRGGV

SEQ ID NO: 21443 - protein, 10 aa, synthetic construct
CAKATHDLQA

SEQ ID NO: 21444 - protein, 12 aa, synthetic construct
QAQSEGISLQAM

SEQ ID NO: 21445 - protein, 11 aa, synthetic construct
LRDYQELMNVK

SEQ ID NO: 21446 - protein, 10 aa, synthetic construct
LQLSPHQIQA

SEQ ID NO: 21447 - protein, 13 aa, synthetic construct
ARSSGAPGAGRHA

SEQ ID NO: 21448 - protein, 10 aa, synthetic construct
LKNSQDYTEA

SEQ ID NO: 21449 - protein, 11 aa, synthetic construct
QNVPPACQQSA

SEQ ID NO: 21450 - protein, 9 aa, synthetic construct
MCFLTFIQA

SEQ ID NO: 21451 - protein, 11 aa, synthetic construct
DELSPEEIQMA

SEQ ID NO: 21452 - protein, 12 aa, synthetic construct
MAGVFYMLGAAM

SEQ ID NO: 21453 - protein, 10 aa, synthetic construct
EENELYSSAV

SEQ ID NO: 21454 - protein, 12 aa, synthetic construct
MLGDQFNGELEA

SEQ ID NO: 21455 - protein, 10 aa, synthetic construct
HPSPDLIGSA

SEQ ID NO: 21456 - protein, 13 aa, synthetic construct
GYALSGDGAGETF

SEQ ID NO: 21457 - protein, 11 aa, synthetic construct
HGNGGETKIYM

SEQ ID NO: 21458 - protein, 11 aa, synthetic construct
LLNGFDKNADS

SEQ ID NO: 21459 - protein, 10 aa, synthetic construct
EEFVRLEEGS

SEQ ID NO: 21460 - protein, 11 aa, synthetic construct
QYNISVPTADS

SEQ ID NO: 21461 - protein, 9 aa, synthetic construct
VFEVCVCVF

SEQ ID NO: 21462 - protein, 11 aa, synthetic construct
QMDHAGTVSVF

SEQ ID NO: 21463 - protein, 8 aa, synthetic construct
TDEMKRMF

SEQ ID NO: 21464 - protein, 10 aa, synthetic construct
LHLSGMDVTI

SEQ ID NO: 21465 - protein, 10 aa, synthetic construct
FGINIVLTIM

SEQ ID NO: 21466 - protein, 8 aa, synthetic construct
IPYKRLKV

SEQ ID NO: 21467 - protein, 9 aa, synthetic construct
RRLYVLNSM

SEQ ID NO: 21468 - protein, 11 aa, synthetic construct
YGAIARAVLSM

SEQ ID NO: 21469 - protein, 9 aa, synthetic construct
RKFWLALSM

SEQ ID NO: 21470 - protein, 10 aa, synthetic construct
AGYTEKQRVD

SEQ ID NO: 21471 - protein, 11 aa, synthetic construct
TISDGIYGSTF

SEQ ID NO: 21472 - protein, 11 aa, synthetic construct
PTKLGRTNAKW

SEQ ID NO: 21473 - protein, 11 aa, synthetic construct
LPSAERKMVDA

SEQ ID NO: 21474 - protein, 9 aa, synthetic construct
LRDLAQSVY

SEQ ID NO: 21475 - protein, 8 aa, synthetic construct
QFWLLFEY

SEQ ID NO: 21476 - protein, 10 aa, synthetic construct
CLLREILGAY

SEQ ID NO: 21477 - protein, 12 aa, synthetic construct
GGAQTPTKQPEE

SEQ ID NO: 21478 - protein, 10 aa, synthetic construct
SFFKEAPLDL

SEQ ID NO: 21479 - protein, 9 aa, synthetic construct
LLIQKQVQK

SEQ ID NO: 21480 - protein, 9 aa, synthetic construct
LWALLVYNA

SEQ ID NO: 21481 - protein, 10 aa, synthetic construct
KAQVVSEIAL

SEQ ID NO: 21482 - protein, 10 aa, synthetic construct
KENLKEIAKL

SEQ ID NO: 21483 - protein, 9 aa, synthetic construct
EPVKPFLFY

SEQ ID NO: 21484 - protein, 9 aa, synthetic construct
KIGLRLKSI

SEQ ID NO: 21485 - protein, 10 aa, synthetic construct
SKNGKVLYSI

SEQ ID NO: 21486 - protein, 10 aa, synthetic construct
QAQRLPPTPK

SEQ ID NO: 21487 - protein, 9 aa, synthetic construct
KSGKPKVTK

SEQ ID NO: 21488 - protein, 12 aa, synthetic construct
LKSADPRDGTGY

SEQ ID NO: 21489 - protein, 9 aa, synthetic construct
GERKTKTEI

SEQ ID NO: 21490 - protein, 12 aa, synthetic construct
FSSTSVLPHTGY

SEQ ID NO: 21491 - protein, 12 aa, synthetic construct
DIALDDISLTYG

SEQ ID NO: 21492 - protein, 9 aa, synthetic construct
LLRLDGHEL

SEQ ID NO: 21493 - protein, 10 aa, synthetic construct
TITWKLNNLL

SEQ ID NO: 21494 - protein, 8 aa, synthetic construct
IMTRIQTY

SEQ ID NO: 21495 - protein, 9 aa, synthetic construct
SAINKKVHL

SEQ ID NO: 21496 - protein, 10 aa, synthetic construct
VRIAAHLPDL

SEQ ID NO: 21497 - protein, 13 aa, synthetic construct
TNGSGQATSTAEL

SEQ ID NO: 21498 - protein, 10 aa, synthetic construct
NEAAIKNVYL

SEQ ID NO: 21499 - protein, 10 aa, synthetic construct
LRDTPTVGIY

SEQ ID NO: 21500 - protein, 10 aa, synthetic construct
QKAGLEARKI

SEQ ID NO: 21501 - protein, 11 aa, synthetic construct
GVNQGEGLKFV

SEQ ID NO: 21502 - protein, 12 aa, synthetic construct
EGKVHMKGSVAY

SEQ ID NO: 21503 - protein, 11 aa, synthetic construct
LQQEEARLGAL

SEQ ID NO: 21504 - protein, 8 aa, synthetic construct
NLRIFIPK

SEQ ID NO: 21505 - protein, 9 aa, synthetic construct
LLKMSALPK

SEQ ID NO: 21506 - protein, 8 aa, synthetic construct
FRKIDLKP

SEQ ID NO: 21507 - protein, 9 aa, synthetic construct
RLFLGVSPK

SEQ ID NO: 21508 - protein, 10 aa, synthetic construct
AARPQLPMEI

SEQ ID NO: 21509 - protein, 10 aa, synthetic construct
SLYLKISVAL

SEQ ID NO: 21510 - protein, 9 aa, synthetic construct
VLERHITLD

SEQ ID NO: 21511 - protein, 9 aa, synthetic construct
ARVRSYTAF

SEQ ID NO: 21512 - protein, 8 aa, synthetic construct
VLRITPDM

SEQ ID NO: 21513 - protein, 10 aa, synthetic construct
VVVNGRVLEL

SEQ ID NO: 21514 - protein, 13 aa, synthetic construct
AVRAAAVSALAKF

SEQ ID NO: 21515 - protein, 8 aa, synthetic construct
VPKLKRIL

SEQ ID NO: 21516 - protein, 8 aa, synthetic construct
IVREQFKI

SEQ ID NO: 21517 - protein, 11 aa, synthetic construct
EINDIRIIGAI

SEQ ID NO: 21518 - protein, 9 aa, synthetic construct
LVWVESLKI

SEQ ID NO: 21519 - protein, 9 aa, synthetic construct
LLMIFKLTM

SEQ ID NO: 21520 - protein, 10 aa, synthetic construct
KGKPTVLMVP

SEQ ID NO: 21521 - protein, 9 aa, synthetic construct
RLIFAGKKL

SEQ ID NO: 21522 - protein, 10 aa, synthetic construct
LLFGFAIMLV

SEQ ID NO: 21523 - protein, 8 aa, synthetic construct
LRLLLPRV

SEQ ID NO: 21524 - protein, 10 aa, synthetic construct
EPKPKKALAK

SEQ ID NO: 21525 - protein, 9 aa, synthetic construct
THKRQKIAK

SEQ ID NO: 21526 - protein, 10 aa, synthetic construct
RAVIGILQMI

SEQ ID NO: 21527 - protein, 10 aa, synthetic construct
IYVKFATIKS

SEQ ID NO: 21528 - protein, 8 aa, synthetic construct
RRRLRALY

SEQ ID NO: 21529 - protein, 9 aa, synthetic construct
TRLFVVVLA

SEQ ID NO: 21530 - protein, 10 aa, synthetic construct
IRAFLPTSHL

SEQ ID NO: 21531 - protein, 9 aa, synthetic construct
QPRQNKPLL

SEQ ID NO: 21532 - protein, 9 aa, synthetic construct
VPREIIVEK

SEQ ID NO: 21533 - protein, 9 aa, synthetic construct
EPRLLAEEV

SEQ ID NO: 21534 - protein, 9 aa, synthetic construct
KSFNCRIEY

SEQ ID NO: 21535 - protein, 9 aa, synthetic construct
LGEVHRALA

SEQ ID NO: 21536 - protein, 10 aa, synthetic construct
PTPPKRSSSL

SEQ ID NO: 21537 - protein, 9 aa, synthetic construct
RPPLLISLP

SEQ ID NO: 21538 - protein, 11 aa, synthetic construct
AGREVEPAPVG

SEQ ID NO: 21539 - protein, 9 aa, synthetic construct
DEIQRPPVR

SEQ ID NO: 21540 - protein, 10 aa, synthetic construct
PLLGMQLNEV

SEQ ID NO: 21541 - protein, 9 aa, synthetic construct
QLRELENEV

SEQ ID NO: 21542 - protein, 10 aa, synthetic construct
RPRAQVRSAL

SEQ ID NO: 21543 - protein, 10 aa, synthetic construct
RSQLEELEAL

SEQ ID NO: 21544 - protein, 8 aa, synthetic construct
KFRHVFGK

SEQ ID NO: 21545 - protein, 10 aa, synthetic construct
LRLAGLDYEL

SEQ ID NO: 21546 - protein, 9 aa, synthetic construct
MKYIETELK

SEQ ID NO: 21547 - protein, 10 aa, synthetic construct
GKSFAINFKV

SEQ ID NO: 21548 - protein, 10 aa, synthetic construct
AFSQKSHLTV

SEQ ID NO: 21549 - protein, 10 aa, synthetic construct
YFRLSQAYGT

SEQ ID NO: 21550 - protein, 11 aa, synthetic construct
ANAALMKLAQL

SEQ ID NO: 21551 - protein, 11 aa, synthetic construct
VRMLLDAGVEV

SEQ ID NO: 21552 - protein, 10 aa, synthetic construct
MNPQVKAVEY

SEQ ID NO: 21553 - protein, 10 aa, synthetic construct
KGNRNVTLTL

SEQ ID NO: 21554 - protein, 10 aa, synthetic construct
MTAGLVMNTI

SEQ ID NO: 21555 - protein, 11 aa, synthetic construct
PQAPAGLAGPV

SEQ ID NO: 21556 - protein, 9 aa, synthetic construct
KAQVRKIYF

SEQ ID NO: 21557 - protein, 10 aa, synthetic construct
QEVQTSRNVE

SEQ ID NO: 21558 - protein, 12 aa, synthetic construct
FGNSGGPLVNLD

SEQ ID NO: 21559 - protein, 10 aa, synthetic construct
VNQWTTNVVE

SEQ ID NO: 21560 - protein, 9 aa, synthetic construct
RGAVYHSYL

SEQ ID NO: 21561 - protein, 8 aa, synthetic construct
QTRKLAIL

SEQ ID NO: 21562 - protein, 11 aa, synthetic construct
GRGSLPLLLLL

SEQ ID NO: 21563 - protein, 9 aa, synthetic construct
AHRELLAGF

SEQ ID NO: 21564 - protein, 8 aa, synthetic construct
MKPLHLQF

SEQ ID NO: 21565 - protein, 9 aa, synthetic construct
PQPARQTLP

SEQ ID NO: 21566 - protein, 10 aa, synthetic construct
WPPKKSSFLP

SEQ ID NO: 21567 - protein, 9 aa, synthetic construct
HEMLFLNVI

SEQ ID NO: 21568 - protein, 9 aa, synthetic construct
WPLGIRDYL

SEQ ID NO: 21569 - protein, 9 aa, synthetic construct
MIVLMHGQI

SEQ ID NO: 21570 - protein, 9 aa, synthetic construct
DPLFPPMQI

SEQ ID NO: 21571 - protein, 9 aa, synthetic construct
LQDPRLQGM

SEQ ID NO: 21572 - protein, 9 aa, synthetic construct
SGRSLRLTF

SEQ ID NO: 21573 - protein, 10 aa, synthetic construct
PRAQRGLLTF

SEQ ID NO: 21574 - protein, 9 aa, synthetic construct
VPKMLANIF

SEQ ID NO: 21575 - protein, 10 aa, synthetic construct
LRPALPLILG

SEQ ID NO: 21576 - protein, 10 aa, synthetic construct
LEIMTKIQTF

SEQ ID NO: 21577 - protein, 9 aa, synthetic construct
GPTLPRAEI

SEQ ID NO: 21578 - protein, 8 aa, synthetic construct
HPKNIQSL

SEQ ID NO: 21579 - protein, 9 aa, synthetic construct
VKDLGHVSY

SEQ ID NO: 21580 - protein, 8 aa, synthetic construct
MLLLYVTY

SEQ ID NO: 21581 - protein, 10 aa, synthetic construct
MAVLQGLPEM

SEQ ID NO: 21582 - protein, 9 aa, synthetic construct
ITEFVLLGF

SEQ ID NO: 21583 - protein, 9 aa, synthetic construct
ALHQRPLGF

SEQ ID NO: 21584 - protein, 9 aa, synthetic construct
QRLPGSQPF

SEQ ID NO: 21585 - protein, 12 aa, synthetic construct
LLSSTRPAAPEF

SEQ ID NO: 21586 - protein, 13 aa, synthetic construct
SGQNPVHGGRVLL

SEQ ID NO: 21587 - protein, 10 aa, synthetic construct
DPRKLTRNLL

SEQ ID NO: 21588 - protein, 9 aa, synthetic construct
QMNGRKITL

SEQ ID NO: 21589 - protein, 10 aa, synthetic construct
ESDKTAVLTL

SEQ ID NO: 21590 - protein, 9 aa, synthetic construct
RPDMIILQI

SEQ ID NO: 21591 - protein, 11 aa, synthetic construct
RPEAARYLERL

SEQ ID NO: 21592 - protein, 10 aa, synthetic construct
DPSTPIPLKY

SEQ ID NO: 21593 - protein, 11 aa, synthetic construct
VGGSRPVLIMM

SEQ ID NO: 21594 - protein, 8 aa, synthetic construct
RKMMLEDF

SEQ ID NO: 21595 - protein, 9 aa, synthetic construct
QLCKDRFEY

SEQ ID NO: 21596 - protein, 10 aa, synthetic construct
GWGEKSQTSL

SEQ ID NO: 21597 - protein, 8 aa, synthetic construct
LRMEIKSR

SEQ ID NO: 21598 - protein, 11 aa, synthetic construct
PTLSTSAPQEY

SEQ ID NO: 21599 - protein, 10 aa, synthetic construct
RRLDSESSPY

SEQ ID NO: 21600 - protein, 10 aa, synthetic construct
MAFKISSTSL

SEQ ID NO: 21601 - protein, 9 aa, synthetic construct
SRLQMLTDA

SEQ ID NO: 21602 - protein, 10 aa, synthetic construct
TVSSLLQKEI

SEQ ID NO: 21603 - protein, 10 aa, synthetic construct
LRPHGGKSLL

SEQ ID NO: 21604 - protein, 8 aa, synthetic construct
MLQRKLYI

SEQ ID NO: 21605 - protein, 9 aa, synthetic construct
RPHAFQVIL

SEQ ID NO: 21606 - protein, 8 aa, synthetic construct
RQLMKLYL

SEQ ID NO: 21607 - protein, 9 aa, synthetic construct
VVSYLTSAL

SEQ ID NO: 21608 - protein, 10 aa, synthetic construct
RPHAGTLQKS

SEQ ID NO: 21609 - protein, 9 aa, synthetic construct
RLHPSITVL

SEQ ID NO: 21610 - protein, 9 aa, synthetic construct
RPHPVPRHF

SEQ ID NO: 21611 - protein, 9 aa, synthetic construct
IPRFLITYE

SEQ ID NO: 21612 - protein, 10 aa, synthetic construct
LPRFPRMLPT

SEQ ID NO: 21613 - protein, 10 aa, synthetic construct
MSFLHIVFSI

SEQ ID NO: 21614 - protein, 9 aa, synthetic construct
PKKNILLTI

SEQ ID NO: 21615 - protein, 8 aa, synthetic construct
RKRRPLTI

SEQ ID NO: 21616 - protein, 9 aa, synthetic construct
AEIRALYAF

SEQ ID NO: 21617 - protein, 10 aa, synthetic construct
KVQAMPVTEL

SEQ ID NO: 21618 - protein, 10 aa, synthetic construct
LEGKLKGPQI

SEQ ID NO: 21619 - protein, 9 aa, synthetic construct
ELRLPSVVI

SEQ ID NO: 21620 - protein, 9 aa, synthetic construct
ALHIWSNIL

SEQ ID NO: 21621 - protein, 9 aa, synthetic construct
YKGYVPNLL

SEQ ID NO: 21622 - protein, 8 aa, synthetic construct
LKKKSHGF

SEQ ID NO: 21623 - protein, 9 aa, synthetic construct
EKLPRGLEI

SEQ ID NO: 21624 - protein, 10 aa, synthetic construct
QKPRVMAGTL

SEQ ID NO: 21625 - protein, 9 aa, synthetic construct
TPIPRKLVS

SEQ ID NO: 21626 - protein, 10 aa, synthetic construct
HPTYIKPVLF

SEQ ID NO: 21627 - protein, 12 aa, synthetic construct
AAGSFGLKRPSL

SEQ ID NO: 21628 - protein, 11 aa, synthetic construct
SAPRIQGKFSL

SEQ ID NO: 21629 - protein, 10 aa, synthetic construct
RLAGFTARIT

SEQ ID NO: 21630 - protein, 9 aa, synthetic construct
PLHALRQVL

SEQ ID NO: 21631 - protein, 10 aa, synthetic construct
PLKIAGVLTA

SEQ ID NO: 21632 - protein, 9 aa, synthetic construct
RIPQGPEIF

SEQ ID NO: 21633 - protein, 9 aa, synthetic construct
RKVTPLSRF

SEQ ID NO: 21634 - protein, 9 aa, synthetic construct
PRLYEIIVL

SEQ ID NO: 21635 - protein, 9 aa, synthetic construct
YIKNPRIVL

SEQ ID NO: 21636 - protein, 10 aa, synthetic construct
RMPTSSVVNM

SEQ ID NO: 21637 - protein, 8 aa, synthetic construct
FFKTLTGL

SEQ ID NO: 21638 - protein, 10 aa, synthetic construct
FVNVTHNGTY

SEQ ID NO: 21639 - protein, 9 aa, synthetic construct
APPGLPREV

SEQ ID NO: 21640 - protein, 8 aa, synthetic construct
PLRPPQEV

SEQ ID NO: 21641 - protein, 11 aa, synthetic construct
LLESHGGQLAL

SEQ ID NO: 21642 - protein, 11 aa, synthetic construct
HQPRASTNPQL

SEQ ID NO: 21643 - protein, 9 aa, synthetic construct
ESVLRHVGL

SEQ ID NO: 21644 - protein, 9 aa, synthetic construct
ERSHVLVGL

SEQ ID NO: 21645 - protein, 8 aa, synthetic construct
RPNQDQIL

SEQ ID NO: 21646 - protein, 9 aa, synthetic construct
SPLKRNCFI

SEQ ID NO: 21647 - protein, 12 aa, synthetic construct
AKVTTASSKTVI

SEQ ID NO: 21648 - protein, 9 aa, synthetic construct
LWLVLPGVL

SEQ ID NO: 21649 - protein, 10 aa, synthetic construct
APGLRLLEAL

SEQ ID NO: 21650 - protein, 9 aa, synthetic construct
SLRPAQSFL

SEQ ID NO: 21651 - protein, 9 aa, synthetic construct
APQSRLSFL

SEQ ID NO: 21652 - protein, 9 aa, synthetic construct
RTPIIWSTI

SEQ ID NO: 21653 - protein, 9 aa, synthetic construct
WNVLPRDLF

SEQ ID NO: 21654 - protein, 10 aa, synthetic construct
RSANTQVVRE

SEQ ID NO: 21655 - protein, 11 aa, synthetic construct
RDGPGVLWIFL

SEQ ID NO: 21656 - protein, 11 aa, synthetic construct
VLSPQNIEIFL

SEQ ID NO: 21657 - protein, 10 aa, synthetic construct
IYPLHDVFIR

SEQ ID NO: 21658 - protein, 9 aa, synthetic construct
RQEGRRVHF

SEQ ID NO: 21659 - protein, 12 aa, synthetic construct
ISKSLGILGILL

SEQ ID NO: 21660 - protein, 12 aa, synthetic construct
VGKEGQALPIHL

SEQ ID NO: 21661 - protein, 10 aa, synthetic construct
QKTFLPQQKL

SEQ ID NO: 21662 - protein, 10 aa, synthetic construct
ICHIVQELPR

SEQ ID NO: 21663 - protein, 8 aa, synthetic construct
REHVRLLL

SEQ ID NO: 21664 - protein, 10 aa, synthetic construct
VRRLEHLLQL

SEQ ID NO: 21665 - protein, 12 aa, synthetic construct
QVRAGSAGQTFL

SEQ ID NO: 21666 - protein, 11 aa, synthetic construct
RRLMFGAGVGL

SEQ ID NO: 21667 - protein, 11 aa, synthetic construct
RPRAPETSLSI

SEQ ID NO: 21668 - protein, 9 aa, synthetic construct
GSRAAPLNL

SEQ ID NO: 21669 - protein, 10 aa, synthetic construct
FPGALCVVEL

SEQ ID NO: 21670 - protein, 11 aa, synthetic construct
LHPSGRVNGSL

SEQ ID NO: 21671 - protein, 9 aa, synthetic construct
RSGPGPPEL

SEQ ID NO: 21672 - protein, 8 aa, synthetic construct
SRIPLPLH

SEQ ID NO: 21673 - protein, 12 aa, synthetic construct
TTTATVSGLVAL

SEQ ID NO: 21674 - protein, 11 aa, synthetic construct
LVGPDNVHVAL

SEQ ID NO: 21675 - protein, 9 aa, synthetic construct
LSLPVRLSY

SEQ ID NO: 21676 - protein, 10 aa, synthetic construct
LSGSRPPLLR

SEQ ID NO: 21677 - protein, 10 aa, synthetic construct
GSRSLPPLLR

SEQ ID NO: 21678 - protein, 9 aa, synthetic construct
DKRTPLPRL

SEQ ID NO: 21679 - protein, 10 aa, synthetic construct
SGPLRSPIRL

SEQ ID NO: 21680 - protein, 9 aa, synthetic construct
RPVAQDVAL

SEQ ID NO: 21681 - protein, 10 aa, synthetic construct
ALGRPVIDKT

SEQ ID NO: 21682 - protein, 10 aa, synthetic construct
QPIPCKPVEY

SEQ ID NO: 21683 - protein, 10 aa, synthetic construct
RVHLPQEGAF

SEQ ID NO: 21684 - protein, 10 aa, synthetic construct
AASYNVKTAY

SEQ ID NO: 21685 - protein, 9 aa, synthetic construct
DLKPRSVTY

SEQ ID NO: 21686 - protein, 12 aa, synthetic construct
LGGHPQPTQVQF

SEQ ID NO: 21687 - protein, 9 aa, synthetic construct
YETLGKKTY

SEQ ID NO: 21688 - protein, 11 aa, synthetic construct
QALKNSFKGQY

SEQ ID NO: 21689 - protein, 9 aa, synthetic construct
NLPRKLRII

SEQ ID NO: 21690 - protein, 11 aa, synthetic construct
RTESPALAEEY

SEQ ID NO: 21691 - protein, 9 aa, synthetic construct
ERVKNGLNF

SEQ ID NO: 21692 - protein, 10 aa, synthetic construct
ILSPSSDLTL

SEQ ID NO: 21693 - protein, 11 aa, synthetic construct
FQVSRAQDFQV

SEQ ID NO: 21694 - protein, 11 aa, synthetic construct
TQPLLDLNHTL

SEQ ID NO: 21695 - protein, 10 aa, synthetic construct
EEPSLRRHQL

SEQ ID NO: 21696 - protein, 11 aa, synthetic construct
SGLLGVLPPNI

SEQ ID NO: 21697 - protein, 10 aa, synthetic construct
RPACRAATGL

SEQ ID NO: 21698 - protein, 9 aa, synthetic construct
RPWLSMELS

SEQ ID NO: 21699 - protein, 12 aa, synthetic construct
ILISGGPDKGGG

SEQ ID NO: 21700 - protein, 12 aa, synthetic construct
VAGMRALPANAI

SEQ ID NO: 21701 - protein, 11 aa, synthetic construct
SCKPGLLGGSL

SEQ ID NO: 21702 - protein, 11 aa, synthetic construct
MTENIRPNAFQ

SEQ ID NO: 21703 - protein, 11 aa, synthetic construct
ATRQGSPGAVL

SEQ ID NO: 21704 - protein, 10 aa, synthetic construct
LMAANLSSNL

SEQ ID NO: 21705 - protein, 9 aa, synthetic construct
KMEDKVNVL

SEQ ID NO: 21706 - protein, 9 aa, synthetic construct
CLVTEKNVL

SEQ ID NO: 21707 - protein, 10 aa, synthetic construct
SLLRNQFLTI

SEQ ID NO: 21708 - protein, 8 aa, synthetic construct
AMSKRQTV

SEQ ID NO: 21709 - protein, 9 aa, synthetic construct
EDQFIRKFV

SEQ ID NO: 21710 - protein, 10 aa, synthetic construct
IFGNLLKSLI

SEQ ID NO: 21711 - protein, 9 aa, synthetic construct
QLFTFFPQL

SEQ ID NO: 21712 - protein, 9 aa, synthetic construct
KTVAMPIKV

SEQ ID NO: 21713 - protein, 10 aa, synthetic construct
LTSYFKDNGI

SEQ ID NO: 21714 - protein, 11 aa, synthetic construct
NAPSPQFINGI

SEQ ID NO: 21715 - protein, 13 aa, synthetic construct
GRAVGGGGLDEGI

SEQ ID NO: 21716 - protein, 10 aa, synthetic construct
LEWPTDLAVN

SEQ ID NO: 21717 - protein, 10 aa, synthetic construct
VFPSGKFLKV

SEQ ID NO: 21718 - protein, 9 aa, synthetic construct
GNHQPLPYI

SEQ ID NO: 21719 - protein, 9 aa, synthetic construct
INQERFIVV

SEQ ID NO: 21720 - protein, 10 aa, synthetic construct
LIKEEDAVIY

SEQ ID NO: 21721 - protein, 11 aa, synthetic construct
WPLTESQLTFV

SEQ ID NO: 21722 - protein, 9 aa, synthetic construct
RHSKGPLIV

SEQ ID NO: 21723 - protein, 10 aa, synthetic construct
LRLASLLLSL

SEQ ID NO: 21724 - protein, 9 aa, synthetic construct
RKLQLPAGL

SEQ ID NO: 21725 - protein, 9 aa, synthetic construct
RIIGAVRTL

SEQ ID NO: 21726 - protein, 13 aa, synthetic construct
GLGALRPRAPAAR

SEQ ID NO: 21727 - protein, 10 aa, synthetic construct
VFWGGKEKVL

SEQ ID NO: 21728 - protein, 8 aa, synthetic construct
RLNLLRQL

SEQ ID NO: 21729 - protein, 9 aa, synthetic construct
IIDELLNIE

SEQ ID NO: 21730 - protein, 12 aa, synthetic construct
INHAASPYVVHF

SEQ ID NO: 21731 - protein, 10 aa, synthetic construct
KIGWFLGGQL

SEQ ID NO: 21732 - protein, 8 aa, synthetic construct
FFHFFSSL

SEQ ID NO: 21733 - protein, 9 aa, synthetic construct
RYYGAISKL

SEQ ID NO: 21734 - protein, 10 aa, synthetic construct
QPPSVHPCYL

SEQ ID NO: 21735 - protein, 9 aa, synthetic construct
MTGHTRSSL

SEQ ID NO: 21736 - protein, 8 aa, synthetic construct
ENFRNLML

SEQ ID NO: 21737 - protein, 9 aa, synthetic construct
LGLRRSFKC

SEQ ID NO: 21738 - protein, 8 aa, synthetic construct
RFLQRLGF

SEQ ID NO: 21739 - protein, 11 aa, synthetic construct
TLNKYVVIIAY

SEQ ID NO: 21740 - protein, 9 aa, synthetic construct
RRALRAPLL

SEQ ID NO: 21741 - protein, 9 aa, synthetic construct
LRVGRPVLR

SEQ ID NO: 21742 - protein, 9 aa, synthetic construct
LKILQLQRF

SEQ ID NO: 21743 - protein, 12 aa, synthetic construct
AASKSYNQSGLV

SEQ ID NO: 21744 - protein, 10 aa, synthetic construct
MNGKVRIRVL

SEQ ID NO: 21745 - protein, 11 aa, synthetic construct
ELTVENVASSV

SEQ ID NO: 21746 - protein, 10 aa, synthetic construct
KTITSALKTY

SEQ ID NO: 21747 - protein, 11 aa, synthetic construct
ENIVSTVLSSY

SEQ ID NO: 21748 - protein, 9 aa, synthetic construct
KRRMDLLFL

SEQ ID NO: 21749 - protein, 14 aa, synthetic construct
LGHLLLLGPASTVF

SEQ ID NO: 21750 - protein, 11 aa, synthetic construct
SAEQPVQFRSF

SEQ ID NO: 21751 - protein, 10 aa, synthetic construct
FDTVIYKYVY

SEQ ID NO: 21752 - protein, 11 aa, synthetic construct
PSLDTIKMQVY

SEQ ID NO: 21753 - protein, 11 aa, synthetic construct
ISGGFRSIIEH

SEQ ID NO: 21754 - protein, 11 aa, synthetic construct
LLTFIANGKEL

SEQ ID NO: 21755 - protein, 10 aa, synthetic construct
VRFGLASLRL

SEQ ID NO: 21756 - protein, 12 aa, synthetic construct
PVSAFVRRNVAV

SEQ ID NO: 21757 - protein, 10 aa, synthetic construct
YDTLSKKVKI

SEQ ID NO: 21758 - protein, 10 aa, synthetic construct
ARVFMKSVKL

SEQ ID NO: 21759 - protein, 11 aa, synthetic construct
ISITQEGGLRL

SEQ ID NO: 21760 - protein, 8 aa, synthetic construct
RSRPFHFL

SEQ ID NO: 21761 - protein, 12 aa, synthetic construct
LSYVVLPGTGKT

SEQ ID NO: 21762 - protein, 11 aa, synthetic construct
MTAKLSTSFVL

SEQ ID NO: 21763 - protein, 10 aa, synthetic construct
MNIEPAILVM

SEQ ID NO: 21764 - protein, 10 aa, synthetic construct
LRHAASVMVM

SEQ ID NO: 21765 - protein, 9 aa, synthetic construct
KERMIHSVM

SEQ ID NO: 21766 - protein, 10 aa, synthetic construct
EIIDEKGPVM

SEQ ID NO: 21767 - protein, 10 aa, synthetic construct
QTDPNKVVVM

SEQ ID NO: 21768 - protein, 9 aa, synthetic construct
HSQLMRLMV

SEQ ID NO: 21769 - protein, 9 aa, synthetic construct
LVRQVEALK

SEQ ID NO: 21770 - protein, 9 aa, synthetic construct
LARRSLHAL

SEQ ID NO: 21771 - protein, 9 aa, synthetic construct
RLPIMKHTL

SEQ ID NO: 21772 - protein, 9 aa, synthetic construct
IIYHVIHTI

SEQ ID NO: 21773 - protein, 11 aa, synthetic construct
VDVVRLVEEVK

SEQ ID NO: 21774 - protein, 11 aa, synthetic construct
EAALQAIRKKM

SEQ ID NO: 21775 - protein, 11 aa, synthetic construct
EGMLIQLRFLK

SEQ ID NO: 21776 - protein, 11 aa, synthetic construct
GLRVLTLGGGL

SEQ ID NO: 21777 - protein, 10 aa, synthetic construct
SALRWLGRYY

SEQ ID NO: 21778 - protein, 8 aa, synthetic construct
FLRYRPLI

SEQ ID NO: 21779 - protein, 11 aa, synthetic construct
IRASVGAGFLY

SEQ ID NO: 21780 - protein, 10 aa, synthetic construct
LQEKLKAAKA

SEQ ID NO: 21781 - protein, 9 aa, synthetic construct
LRRDLVLRS

SEQ ID NO: 21782 - protein, 9 aa, synthetic construct
ERRVPLQLP

SEQ ID NO: 21783 - protein, 10 aa, synthetic construct
PDLRRLPGAI

SEQ ID NO: 21784 - protein, 11 aa, synthetic construct
QPPARNAKLLK

SEQ ID NO: 21785 - protein, 11 aa, synthetic construct
LSSLKIHGQKF

SEQ ID NO: 21786 - protein, 9 aa, synthetic construct
RIQLRAGKI

SEQ ID NO: 21787 - protein, 9 aa, synthetic construct
LRAILRIIY

SEQ ID NO: 21788 - protein, 9 aa, synthetic construct
DRRLLLHQL

SEQ ID NO: 21789 - protein, 9 aa, synthetic construct
LRLLLLRTI

SEQ ID NO: 21790 - protein, 9 aa, synthetic construct
RRLLLLLPL

SEQ ID NO: 21791 - protein, 11 aa, synthetic construct
PKSKRDKKVSL

SEQ ID NO: 21792 - protein, 10 aa, synthetic construct
YRGLRGHVLY

SEQ ID NO: 21793 - protein, 12 aa, synthetic construct
AISRINNAAFEA

SEQ ID NO: 21794 - protein, 9 aa, synthetic construct
LPTQKMLRI

SEQ ID NO: 21795 - protein, 10 aa, synthetic construct
VARMALLIRY

SEQ ID NO: 21796 - protein, 10 aa, synthetic construct
PFVINAIIRY

SEQ ID NO: 21797 - protein, 10 aa, synthetic construct
RIRVGRALSL

SEQ ID NO: 21798 - protein, 10 aa, synthetic construct
MVPLGRLLVF

SEQ ID NO: 21799 - protein, 11 aa, synthetic construct
LLDSSAPLVRF

SEQ ID NO: 21800 - protein, 10 aa, synthetic construct
ILIQPEIPKY

SEQ ID NO: 21801 - protein, 10 aa, synthetic construct
RMVTLPPWRI

SEQ ID NO: 21802 - protein, 14 aa, synthetic construct
PASPTSSIPDTLTK

SEQ ID NO: 21803 - protein, 10 aa, synthetic construct
AFHPLSPLRF

SEQ ID NO: 21804 - protein, 9 aa, synthetic construct
RLHMVLRPF

SEQ ID NO: 21805 - protein, 9 aa, synthetic construct
LKAREDLLL

SEQ ID NO: 21806 - protein, 11 aa, synthetic construct
QATQLARSLGY

SEQ ID NO: 21807 - protein, 10 aa, synthetic construct
VRIRASTAPF

SEQ ID NO: 21808 - protein, 10 aa, synthetic construct
KANTLKANRF

SEQ ID NO: 21809 - protein, 9 aa, synthetic construct
QITRAELRL

SEQ ID NO: 21810 - protein, 9 aa, synthetic construct
LNKLTELLR

SEQ ID NO: 21811 - protein, 11 aa, synthetic construct
LISTIWSPTKL

SEQ ID NO: 21812 - protein, 11 aa, synthetic construct
FLPPLLRADLK

SEQ ID NO: 21813 - protein, 9 aa, synthetic construct
RRVLVTVNY

SEQ ID NO: 21814 - protein, 9 aa, synthetic construct
RLRVLNVSY

SEQ ID NO: 21815 - protein, 11 aa, synthetic construct
PVLKHVKAYIK

SEQ ID NO: 21816 - protein, 11 aa, synthetic construct
VKEAEVPQAAL

SEQ ID NO: 21817 - protein, 11 aa, synthetic construct
KEGALLAPQDL

SEQ ID NO: 21818 - protein, 12 aa, synthetic construct
SSQSGRRLVPRV

SEQ ID NO: 21819 - protein, 11 aa, synthetic construct
KVSFATRRPEF

SEQ ID NO: 21820 - protein, 12 aa, synthetic construct
ARPGIHQKEETL

SEQ ID NO: 21821 - protein, 13 aa, synthetic construct
TRMAVSLTAAETL

SEQ ID NO: 21822 - protein, 13 aa, synthetic construct
TSVAFSRSGRLLL

SEQ ID NO: 21823 - protein, 12 aa, synthetic construct
RASRARDSNMVR

SEQ ID NO: 21824 - protein, 10 aa, synthetic construct
AWNMLDSHLY

SEQ ID NO: 21825 - protein, 9 aa, synthetic construct
PEEKVSIYK

SEQ ID NO: 21826 - protein, 10 aa, synthetic construct
LFPGSPAIYK

SEQ ID NO: 21827 - protein, 9 aa, synthetic construct
KMATLEREL

SEQ ID NO: 21828 - protein, 12 aa, synthetic construct
QDMLTLQIIRIM

SEQ ID NO: 21829 - protein, 9 aa, synthetic construct
KAFSQKQNF

SEQ ID NO: 21830 - protein, 9 aa, synthetic construct
GFLHMDCEI

SEQ ID NO: 21831 - protein, 9 aa, synthetic construct
SDPEIRTEI

SEQ ID NO: 21832 - protein, 9 aa, synthetic construct
VRAHTYRLL

SEQ ID NO: 21833 - protein, 10 aa, synthetic construct
KLEKNGIGYH

SEQ ID NO: 21834 - protein, 10 aa, synthetic construct
AAPAEFIQLY

SEQ ID NO: 21835 - protein, 10 aa, synthetic construct
QEVSTPELSY

SEQ ID NO: 21836 - protein, 9 aa, synthetic construct
VWNAQLIRY

SEQ ID NO: 21837 - protein, 10 aa, synthetic construct
FSLANELLGY

SEQ ID NO: 21838 - protein, 10 aa, synthetic construct
KGTRLAKPVL

SEQ ID NO: 21839 - protein, 9 aa, synthetic construct
KEIKSLLRM

SEQ ID NO: 21840 - protein, 9 aa, synthetic construct
ERVKNMLLK

SEQ ID NO: 21841 - protein, 10 aa, synthetic construct
SARRSGEVTL

SEQ ID NO: 21842 - protein, 9 aa, synthetic construct
HWLSLPLAL

SEQ ID NO: 21843 - protein, 11 aa, synthetic construct
RCSLTEKEVAR

SEQ ID NO: 21844 - protein, 12 aa, synthetic construct
EPGKMADVFVQK

SEQ ID NO: 21845 - protein, 9 aa, synthetic construct
SRETVILRL

SEQ ID NO: 21846 - protein, 10 aa, synthetic construct
DNRSIEPLTY

SEQ ID NO: 21847 - protein, 11 aa, synthetic construct
TMLRPLSHRTV

SEQ ID NO: 21848 - protein, 9 aa, synthetic construct
SIEARVQEY

SEQ ID NO: 21849 - protein, 10 aa, synthetic construct
GHPGLLILEK

SEQ ID NO: 21850 - protein, 10 aa, synthetic construct
TLIHHNEAVL

SEQ ID NO: 21851 - protein, 8 aa, synthetic construct
KKQQMEQY

SEQ ID NO: 21852 - protein, 9 aa, synthetic construct
LYMHIDFVF

SEQ ID NO: 21853 - protein, 10 aa, synthetic construct
LRKDGPLGFY

SEQ ID NO: 21854 - protein, 13 aa, synthetic construct
SEGLEGSRASEEQ

SEQ ID NO: 21855 - protein, 11 aa, synthetic construct
REVEELMEDTQ

SEQ ID NO: 21856 - protein, 13 aa, synthetic construct
EQSAEQGKSSSQE

SEQ ID NO: 21857 - protein, 14 aa, synthetic construct
MAGAQASDRAGSEQ

SEQ ID NO: 21858 - protein, 10 aa, synthetic construct
DVMFVRQGTY

SEQ ID NO: 21859 - protein, 9 aa, synthetic construct
VLSKMLSTK

SEQ ID NO: 21860 - protein, 11 aa, synthetic construct
LPGRGKAGPSL

SEQ ID NO: 21861 - protein, 10 aa, synthetic construct
ALPAPIEKTI

SEQ ID NO: 21862 - protein, 10 aa, synthetic construct
KDLLPGPVTL

SEQ ID NO: 21863 - protein, 9 aa, synthetic construct
LRVDIEALR

SEQ ID NO: 21864 - protein, 8 aa, synthetic construct
KRHLVKFV

SEQ ID NO: 21865 - protein, 13 aa, synthetic construct
AQVKGAIGSRLAV

SEQ ID NO: 21866 - protein, 9 aa, synthetic construct
NRVIIPVKR

SEQ ID NO: 21867 - protein, 10 aa, synthetic construct
TEGTAKEAAM

SEQ ID NO: 21868 - protein, 10 aa, synthetic construct
GRGIKSPIRI

SEQ ID NO: 21869 - protein, 9 aa, synthetic construct
LERIIRPLS

SEQ ID NO: 21870 - protein, 9 aa, synthetic construct
LVSRKRVLE

SEQ ID NO: 21871 - protein, 11 aa, synthetic construct
SRVLVAVATAL

SEQ ID NO: 21872 - protein, 11 aa, synthetic construct
VKHGYRLAGKY

SEQ ID NO: 21873 - protein, 9 aa, synthetic construct
LFLRDTVIK

SEQ ID NO: 21874 - protein, 9 aa, synthetic construct
FLDTDTICY

SEQ ID NO: 21875 - protein, 12 aa, synthetic construct
AGDRRPAPDTWI

SEQ ID NO: 21876 - protein, 13 aa, synthetic construct
HPATVPSNERPGK

SEQ ID NO: 21877 - protein, 9 aa, synthetic construct
LARMPLGRL

SEQ ID NO: 21878 - protein, 11 aa, synthetic construct
PRPAPRMGEVE

SEQ ID NO: 21879 - protein, 12 aa, synthetic construct
FTSTTSGLTATF

SEQ ID NO: 21880 - protein, 13 aa, synthetic construct
LSENISAAIQANG

SEQ ID NO: 21881 - protein, 15 aa, synthetic construct
GESQPTPAAGGRGEL

SEQ ID NO: 21882 - protein, 10 aa, synthetic construct
VNHNGRDMSE

SEQ ID NO: 21883 - protein, 11 aa, synthetic construct
GTNHDGDIESM

SEQ ID NO: 21884 - protein, 10 aa, synthetic construct
GAAIFCVAVF

SEQ ID NO: 21885 - protein, 9 aa, synthetic construct
STMTPKIVM

SEQ ID NO: 21886 - protein, 9 aa, synthetic construct
GLTCLRMTF

SEQ ID NO: 21887 - protein, 9 aa, synthetic construct
RFSLNTVEL

SEQ ID NO: 21888 - protein, 8 aa, synthetic construct
LQVWRLML

SEQ ID NO: 21889 - protein, 9 aa, synthetic construct
MILRTAAAF

SEQ ID NO: 21890 - protein, 10 aa, synthetic construct
VLIPFWPAVF

SEQ ID NO: 21891 - protein, 10 aa, synthetic construct
LFTSVNQMKL

SEQ ID NO: 21892 - protein, 11 aa, synthetic construct
EPALHLFPGAH

SEQ ID NO: 21893 - protein, 11 aa, synthetic construct
SQPGAKRPSNY

SEQ ID NO: 21894 - protein, 10 aa, synthetic construct
FINTGKFTFS

SEQ ID NO: 21895 - protein, 11 aa, synthetic construct
SMLITVIIDNF

SEQ ID NO: 21896 - protein, 11 aa, synthetic construct
FGTTSPSKSLR

SEQ ID NO: 21897 - protein, 11 aa, synthetic construct
PVPLPADPMEL

SEQ ID NO: 21898 - protein, 11 aa, synthetic construct
LQGYEVLHALG

SEQ ID NO: 21899 - protein, 10 aa, synthetic construct
DITKMSFEEL

SEQ ID NO: 21900 - protein, 10 aa, synthetic construct
YRGLDGFLVV

SEQ ID NO: 21901 - protein, 9 aa, synthetic construct
TKEFRTLTI

SEQ ID NO: 21902 - protein, 9 aa, synthetic construct
LRYLTGAWR

SEQ ID NO: 21903 - protein, 10 aa, synthetic construct
AITHLPAGIF

SEQ ID NO: 21904 - protein, 9 aa, synthetic construct
SLFRVTAVF

SEQ ID NO: 21905 - protein, 9 aa, synthetic construct
LVYIRESKL

SEQ ID NO: 21906 - protein, 9 aa, synthetic construct
MNEQPRQLF

SEQ ID NO: 21907 - protein, 11 aa, synthetic construct
PLHLEAQSIAF

SEQ ID NO: 21908 - protein, 10 aa, synthetic construct
NVAPHQALYL

SEQ ID NO: 21909 - protein, 11 aa, synthetic construct
WMAVTAAVLFE

SEQ ID NO: 21910 - protein, 10 aa, synthetic construct
TKGDMIKFVI

SEQ ID NO: 21911 - protein, 11 aa, synthetic construct
VPAGPQPLSFQ

SEQ ID NO: 21912 - protein, 12 aa, synthetic construct
GTSRHISVGIFG

SEQ ID NO: 21913 - protein, 10 aa, synthetic construct
DTAQNYTIYY

SEQ ID NO: 21914 - protein, 9 aa, synthetic construct
YEMQQLFYE

SEQ ID NO: 21915 - protein, 9 aa, synthetic construct
NEWGYKFTV

SEQ ID NO: 21916 - protein, 10 aa, synthetic construct
MFRATLRGWR

SEQ ID NO: 21917 - protein, 9 aa, synthetic construct
YSCKVMLVV

SEQ ID NO: 21918 - protein, 10 aa, synthetic construct
GPDTRHSFVV

SEQ ID NO: 21919 - protein, 10 aa, synthetic construct
EFSYAMETAY

SEQ ID NO: 21920 - protein, 10 aa, synthetic construct
LMPHMKNEPT

SEQ ID NO: 21921 - protein, 10 aa, synthetic construct
VATALTLMTG

SEQ ID NO: 21922 - protein, 9 aa, synthetic construct
QRFMDLATY

SEQ ID NO: 21923 - protein, 10 aa, synthetic construct
AVAYRQMSLL

SEQ ID NO: 21924 - protein, 11 aa, synthetic construct
EYAKSMILHSI

SEQ ID NO: 21925 - protein, 11 aa, synthetic construct
AAAASAAAYAA

SEQ ID NO: 21926 - protein, 9 aa, synthetic construct
LGTAEMSVL

SEQ ID NO: 21927 - protein, 9 aa, synthetic construct
GETAVLDAF

SEQ ID NO: 21928 - protein, 8 aa, synthetic construct
FQTLTPGG

SEQ ID NO: 21929 - protein, 8 aa, synthetic construct
TAFGQPSL

SEQ ID NO: 21930 - protein, 8 aa, synthetic construct
ASVSQAVF

SEQ ID NO: 21931 - protein, 9 aa, synthetic construct
MQADARAFF

SEQ ID NO: 21932 - protein, 8 aa, synthetic construct
MTVMHKFF

SEQ ID NO: 21933 - protein, 10 aa, synthetic construct
NAGLTGAPIF

SEQ ID NO: 21934 - protein, 8 aa, synthetic construct
SAAHILNR

SEQ ID NO: 21935 - protein, 9 aa, synthetic construct
SAALRHGAV

SEQ ID NO: 21936 - protein, 8 aa, synthetic construct
AGTNLHRL

SEQ ID NO: 21937 - protein, 9 aa, synthetic construct
GTDHLPVLF

SEQ ID NO: 21938 - protein, 9 aa, synthetic construct
LFMVATGIF

SEQ ID NO: 21939 - protein, 9 aa, synthetic construct
AASQAGVPF

SEQ ID NO: 21940 - protein, 9 aa, synthetic construct
RNLLVYSFY

SEQ ID NO: 21941 - protein, 9 aa, synthetic construct
NEYTAISYY

SEQ ID NO: 21942 - protein, 8 aa, synthetic construct
ETGKVTDI

SEQ ID NO: 21943 - protein, 9 aa, synthetic construct
SGVGTWSLY

SEQ ID NO: 21944 - protein, 9 aa, synthetic construct
SALGSHAFF

SEQ ID NO: 21945 - protein, 9 aa, synthetic construct
FFGGDVSAL

SEQ ID NO: 21946 - protein, 8 aa, synthetic construct
FSIQMSAL

SEQ ID NO: 21947 - protein, 11 aa, synthetic construct
TCAGGVGVAGF

SEQ ID NO: 21948 - protein, 9 aa, synthetic construct
SFSCDVETY

SEQ ID NO: 21949 - protein, 9 aa, synthetic construct
LGQTDVAVY

SEQ ID NO: 21950 - protein, 11 aa, synthetic construct
EGSGSGSSSHE

SEQ ID NO: 21951 - protein, 9 aa, synthetic construct
YMNGSPTYS

SEQ ID NO: 21952 - protein, 10 aa, synthetic construct
GQAEATPNEF

SEQ ID NO: 21953 - protein, 8 aa, synthetic construct
FQSILPFV

SEQ ID NO: 21954 - protein, 8 aa, synthetic construct
SKYPLPVF

SEQ ID NO: 21955 - protein, 8 aa, synthetic construct
SAFWALRL

SEQ ID NO: 21956 - protein, 9 aa, synthetic construct
FSAFINLVE

SEQ ID NO: 21957 - protein, 10 aa, synthetic construct
GTFPKALTNG

SEQ ID NO: 21958 - protein, 9 aa, synthetic construct
MGHPLFPTW

SEQ ID NO: 21959 - protein, 9 aa, synthetic construct
TGPFFPVLS

SEQ ID NO: 21960 - protein, 10 aa, synthetic construct
LRAPKAPDAT

SEQ ID NO: 21961 - protein, 9 aa, synthetic construct
ISMSALNFY

SEQ ID NO: 21962 - protein, 10 aa, synthetic construct
FASEIENKGT

SEQ ID NO: 21963 - protein, 11 aa, synthetic construct
EGSAVKKVASA

SEQ ID NO: 21964 - protein, 12 aa, synthetic construct
SAGMLQGGASGE

SEQ ID NO: 21965 - protein, 9 aa, synthetic construct
MLVRHQETG

SEQ ID NO: 21966 - protein, 8 aa, synthetic construct
ELIENSYI

SEQ ID NO: 21967 - protein, 9 aa, synthetic construct
FSAFSGFPS

SEQ ID NO: 21968 - protein, 10 aa, synthetic construct
TSRMWDAVLY

SEQ ID NO: 21969 - protein, 7 aa, synthetic construct
VQTIVHR

SEQ ID NO: 21970 - protein, 8 aa, synthetic construct
QIHPSPLK

SEQ ID NO: 21971 - protein, 9 aa, synthetic construct
TNVAADLMY

SEQ ID NO: 21972 - protein, 9 aa, synthetic construct
YASHAHLSI

SEQ ID NO: 21973 - protein, 10 aa, synthetic construct
TGIAPFIGFL

SEQ ID NO: 21974 - protein, 9 aa, synthetic construct
SALSPEGVL

SEQ ID NO: 21975 - protein, 11 aa, synthetic construct
DETVKDGVTLY

SEQ ID NO: 21976 - protein, 8 aa, synthetic construct
VLKASSVL

SEQ ID NO: 21977 - protein, 12 aa, synthetic construct
VASASRLTGLLG

SEQ ID NO: 21978 - protein, 10 aa, synthetic construct
TLMSCTRSVY

SEQ ID NO: 21979 - protein, 8 aa, synthetic construct
MAHREIYQ

SEQ ID NO: 21980 - protein, 8 aa, synthetic construct
HPLLPASA

SEQ ID NO: 21981 - protein, 9 aa, synthetic construct
AVTPAEPYA

SEQ ID NO: 21982 - protein, 9 aa, synthetic construct
AISPATMEV

SEQ ID NO: 21983 - protein, 8 aa, synthetic construct
GTLLPLQK

SEQ ID NO: 21984 - protein, 8 aa, synthetic construct
VTPEKIAY

SEQ ID NO: 21985 - protein, 10 aa, synthetic construct
AESALQLLYT

SEQ ID NO: 21986 - protein, 10 aa, synthetic construct
ASSMVIAVSY

SEQ ID NO: 21987 - protein, 9 aa, synthetic construct
LSANFSYNA

SEQ ID NO: 21988 - protein, 7 aa, synthetic construct
REDLIAY

SEQ ID NO: 21989 - protein, 9 aa, synthetic construct
ASNILRKND

SEQ ID NO: 21990 - protein, 7 aa, synthetic construct
QPTVLEL

SEQ ID NO: 21991 - protein, 9 aa, synthetic construct
SALDCPSLN

SEQ ID NO: 21992 - protein, 10 aa, synthetic construct
SASSPGPELV

SEQ ID NO: 21993 - protein, 9 aa, synthetic construct
TGLDPPSSL

SEQ ID NO: 21994 - protein, 9 aa, synthetic construct
SAGPPGLLL

SEQ ID NO: 21995 - protein, 9 aa, synthetic construct
SAGANPGLL

SEQ ID NO: 21996 - protein, 8 aa, synthetic construct
LENMLFAS

SEQ ID NO: 21997 - protein, 9 aa, synthetic construct
LSAPIFTTS

SEQ ID NO: 21998 - protein, 10 aa, synthetic construct
SAGSSLRIAL

SEQ ID NO: 21999 - protein, 9 aa, synthetic construct
SAPIINFSA

SEQ ID NO: 22000 - protein, 10 aa, synthetic construct
PASLGPASLT

SEQ ID NO: 22001 - protein, 9 aa, synthetic construct
IPNTTVASL

SEQ ID NO: 22002 - protein, 10 aa, synthetic construct
GTLRSPLGGL

SEQ ID NO: 22003 - protein, 8 aa, synthetic construct
ELNPLQAL

SEQ ID NO: 22004 - protein, 8 aa, synthetic construct
EKPAAEIM

SEQ ID NO: 22005 - protein, 9 aa, synthetic construct
SAVPPGTIP

SEQ ID NO: 22006 - protein, 11 aa, synthetic construct
TIDATGNSVSA

SEQ ID NO: 22007 - protein, 11 aa, synthetic construct
SAAGSSSFSRT

SEQ ID NO: 22008 - protein, 9 aa, synthetic construct
AVLGTASAL

SEQ ID NO: 22009 - protein, 10 aa, synthetic construct
NIGPTEDVQA

SEQ ID NO: 22010 - protein, 9 aa, synthetic construct
ISLSGRLNY

SEQ ID NO: 22011 - protein, 10 aa, synthetic construct
SLATGAGAIY

SEQ ID NO: 22012 - protein, 9 aa, synthetic construct
FEDSVSLAY

SEQ ID NO: 22013 - protein, 9 aa, synthetic construct
TSAVIDEFV

SEQ ID NO: 22014 - protein, 7 aa, synthetic construct
CRRTCYY

SEQ ID NO: 22015 - protein, 9 aa, synthetic construct
STAYALEEY

SEQ ID NO: 22016 - protein, 9 aa, synthetic construct
ASVALGMLY

SEQ ID NO: 22017 - protein, 9 aa, synthetic construct
LGSDFRLLT

SEQ ID NO: 22018 - protein, 8 aa, synthetic construct
EKDFLKNK

SEQ ID NO: 22019 - protein, 9 aa, synthetic construct
SGLIDTSFC

SEQ ID NO: 22020 - protein, 9 aa, synthetic construct
TAEGIHLNM

SEQ ID NO: 22021 - protein, 9 aa, synthetic construct
SALEAHWST

SEQ ID NO: 22022 - protein, 11 aa, synthetic construct
TGVEGECLPVP

SEQ ID NO: 22023 - protein, 8 aa, synthetic construct
IKEEVFQE

SEQ ID NO: 22024 - protein, 9 aa, synthetic construct
TGVNLKDAY

SEQ ID NO: 22025 - protein, 9 aa, synthetic construct
GVTLLPFLV

SEQ ID NO: 22026 - protein, 9 aa, synthetic construct
ALCNGDSKM

SEQ ID NO: 22027 - protein, 8 aa, synthetic construct
LLCTASVY

SEQ ID NO: 22028 - protein, 9 aa, synthetic construct
SYATPVDLW

SEQ ID NO: 22029 - protein, 9 aa, synthetic construct
ASLDMVAPI

SEQ ID NO: 22030 - protein, 9 aa, synthetic construct
YSCDPYTLA

SEQ ID NO: 22031 - protein, 9 aa, synthetic construct
SCLERVSLS

SEQ ID NO: 22032 - protein, 10 aa, synthetic construct
GMSHVPSLSY

SEQ ID NO: 22033 - protein, 10 aa, synthetic construct
EGKCLQSGFE

SEQ ID NO: 22034 - protein, 9 aa, synthetic construct
CSSLPSLTL

SEQ ID NO: 22035 - protein, 10 aa, synthetic construct
SSSRSSSESS

SEQ ID NO: 22036 - protein, 12 aa, synthetic construct
SPSSSTSSSSSY

SEQ ID NO: 22037 - protein, 11 aa, synthetic construct
SSSRSSSESSY

SEQ ID NO: 22038 - protein, 12 aa, synthetic construct
IGGGDDSFNTFF

SEQ ID NO: 22039 - protein, 9 aa, synthetic construct
DSEAAVSAD

SEQ ID NO: 22040 - protein, 12 aa, synthetic construct
KEDPWNSITSGA

SEQ ID NO: 22041 - protein, 14 aa, synthetic construct
SPTSPSLGTGQGES

SEQ ID NO: 22042 - protein, 11 aa, synthetic construct
QKIMDLYGQPE

SEQ ID NO: 22043 - protein, 11 aa, synthetic construct
DEKLMFHVDNG

SEQ ID NO: 22044 - protein, 12 aa, synthetic construct
SREPEMGADSLL

SEQ ID NO: 22045 - protein, 12 aa, synthetic construct
GMTSIVMDPQPE

SEQ ID NO: 22046 - protein, 12 aa, synthetic construct
KMADPEMLPAGE

SEQ ID NO: 22047 - protein, 12 aa, synthetic construct
VSGEFAMLWHGA

SEQ ID NO: 22048 - protein, 11 aa, synthetic construct
KEDHLMSAMNI

SEQ ID NO: 22049 - protein, 8 aa, synthetic construct
QTTIGYGY

SEQ ID NO: 22050 - protein, 9 aa, synthetic construct
SDLKTMEKP

SEQ ID NO: 22051 - protein, 8 aa, synthetic construct
SLDDMEKI

SEQ ID NO: 22052 - protein, 11 aa, synthetic construct
HNLSSSTFQLY

SEQ ID NO: 22053 - protein, 9 aa, synthetic construct
SDVEGGVEK

SEQ ID NO: 22054 - protein, 10 aa, synthetic construct
AAAMSSPPQY

SEQ ID NO: 22055 - protein, 10 aa, synthetic construct
MGSLSGWTSP

SEQ ID NO: 22056 - protein, 9 aa, synthetic construct
TFTLEEGTI

SEQ ID NO: 22057 - protein, 9 aa, synthetic construct
TETQVFVAT

SEQ ID NO: 22058 - protein, 9 aa, synthetic construct
GYDVSVAGT

SEQ ID NO: 22059 - protein, 12 aa, synthetic construct
PGDGGQSALGAW

SEQ ID NO: 22060 - protein, 9 aa, synthetic construct
AKLPSTSTL

SEQ ID NO: 22061 - protein, 11 aa, synthetic construct
IPSSSLGTAWT

SEQ ID NO: 22062 - protein, 10 aa, synthetic construct
EASPSDLALA

SEQ ID NO: 22063 - protein, 9 aa, synthetic construct
GTEAEPLPL

SEQ ID NO: 22064 - protein, 8 aa, synthetic construct
HCEVPLTA

SEQ ID NO: 22065 - protein, 9 aa, synthetic construct
HPCLEVTAA

SEQ ID NO: 22066 - protein, 10 aa, synthetic construct
TMQGMEQAMP

SEQ ID NO: 22067 - protein, 10 aa, synthetic construct
TDAVEALTAL

SEQ ID NO: 22068 - protein, 9 aa, synthetic construct
DTFQKFVDA

SEQ ID NO: 22069 - protein, 9 aa, synthetic construct
WISLRGDDT

SEQ ID NO: 22070 - protein, 9 aa, synthetic construct
DTTRDLILL

SEQ ID NO: 22071 - protein, 10 aa, synthetic construct
LNTGCCAGVW

SEQ ID NO: 22072 - protein, 9 aa, synthetic construct
DKEEGTSWW

SEQ ID NO: 22073 - protein, 9 aa, synthetic construct
TTDDSICVL

SEQ ID NO: 22074 - protein, 10 aa, synthetic construct
TSDMEAVVSI

SEQ ID NO: 22075 - protein, 10 aa, synthetic construct
LEDTTELGGL

SEQ ID NO: 22076 - protein, 9 aa, synthetic construct
ESSEQLIKI

SEQ ID NO: 22077 - protein, 10 aa, synthetic construct
TDEITKAAAK

SEQ ID NO: 22078 - protein, 10 aa, synthetic construct
TDAGEAAKIL

SEQ ID NO: 22079 - protein, 9 aa, synthetic construct
LWDLTEDVL

SEQ ID NO: 22080 - protein, 9 aa, synthetic construct
DTFLLFCKV

SEQ ID NO: 22081 - protein, 9 aa, synthetic construct
SEFDYCKIK

SEQ ID NO: 22082 - protein, 9 aa, synthetic construct
AEYDEYRAL

SEQ ID NO: 22083 - protein, 9 aa, synthetic construct
FESDSFVNT

SEQ ID NO: 22084 - protein, 9 aa, synthetic construct
TFDFDAEYI

SEQ ID NO: 22085 - protein, 9 aa, synthetic construct
DFLSTFITS

SEQ ID NO: 22086 - protein, 10 aa, synthetic construct
TEAQTLFDTL

SEQ ID NO: 22087 - protein, 10 aa, synthetic construct
GLTMRFNIPT

SEQ ID NO: 22088 - protein, 11 aa, synthetic construct
TEKMTTTASEA

SEQ ID NO: 22089 - protein, 11 aa, synthetic construct
EYAISNAEAFA

SEQ ID NO: 22090 - protein, 9 aa, synthetic construct
AYESLILDG

SEQ ID NO: 22091 - protein, 9 aa, synthetic construct
LTAYDLIGD

SEQ ID NO: 22092 - protein, 9 aa, synthetic construct
SEFMTWKQV

SEQ ID NO: 22093 - protein, 10 aa, synthetic construct
YEAQEPLCPA

SEQ ID NO: 22094 - protein, 10 aa, synthetic construct
EFSSSPDSLS

SEQ ID NO: 22095 - protein, 9 aa, synthetic construct
VDSTAYLAA

SEQ ID NO: 22096 - protein, 10 aa, synthetic construct
QGEQASFESF

SEQ ID NO: 22097 - protein, 10 aa, synthetic construct
LFSVCALNVL

SEQ ID NO: 22098 - protein, 9 aa, synthetic construct
SEGFHLRTS

SEQ ID NO: 22099 - protein, 10 aa, synthetic construct
ESDADEELLF

SEQ ID NO: 22100 - protein, 10 aa, synthetic construct
IPCQNMELFA

SEQ ID NO: 22101 - protein, 10 aa, synthetic construct
SVFYGGPLGD

SEQ ID NO: 22102 - protein, 10 aa, synthetic construct
SHAPISDLGD

SEQ ID NO: 22103 - protein, 10 aa, synthetic construct
DVAGDRATLP

SEQ ID NO: 22104 - protein, 10 aa, synthetic construct
DTLLSPDSSF

SEQ ID NO: 22105 - protein, 10 aa, synthetic construct
LGTHYGKVYL

SEQ ID NO: 22106 - protein, 9 aa, synthetic construct
IESINGENI

SEQ ID NO: 22107 - protein, 9 aa, synthetic construct
TVELTVSEA

SEQ ID NO: 22108 - protein, 9 aa, synthetic construct
YTVEASLPP

SEQ ID NO: 22109 - protein, 11 aa, synthetic construct
PDSTKVESLVA

SEQ ID NO: 22110 - protein, 9 aa, synthetic construct
EVTSALSAT

SEQ ID NO: 22111 - protein, 11 aa, synthetic construct
AELCGVGAVLP

SEQ ID NO: 22112 - protein, 10 aa, synthetic construct
VGSTYLPLEA

SEQ ID NO: 22113 - protein, 9 aa, synthetic construct
YADSWTLAS

SEQ ID NO: 22114 - protein, 9 aa, synthetic construct
LEASFLTPA

SEQ ID NO: 22115 - protein, 9 aa, synthetic construct
ESLAGILGT

SEQ ID NO: 22116 - protein, 10 aa, synthetic construct
TDYQVTLQIP

SEQ ID NO: 22117 - protein, 9 aa, synthetic construct
SLEELSISA

SEQ ID NO: 22118 - protein, 10 aa, synthetic construct
LESSAVTVLE

SEQ ID NO: 22119 - protein, 9 aa, synthetic construct
SIEEAKSVA

SEQ ID NO: 22120 - protein, 10 aa, synthetic construct
QTSPATLGLP

SEQ ID NO: 22121 - protein, 9 aa, synthetic construct
DMVLSELAA

SEQ ID NO: 22122 - protein, 9 aa, synthetic construct
MSEFLSGLE

SEQ ID NO: 22123 - protein, 9 aa, synthetic construct
LDFNGETEA

SEQ ID NO: 22124 - protein, 9 aa, synthetic construct
YGMEKFLVE

SEQ ID NO: 22125 - protein, 9 aa, synthetic construct
EGSKQFLSV

SEQ ID NO: 22126 - protein, 9 aa, synthetic construct
TDQLVAVEA

SEQ ID NO: 22127 - protein, 13 aa, synthetic construct
DTSEHQKGQTPDA

SEQ ID NO: 22128 - protein, 9 aa, synthetic construct
TNERILLVL

SEQ ID NO: 22129 - protein, 10 aa, synthetic construct
VLTGDKMETA

SEQ ID NO: 22130 - protein, 9 aa, synthetic construct
SEDSNLHYA

SEQ ID NO: 22131 - protein, 9 aa, synthetic construct
DTGQMISVP

SEQ ID NO: 22132 - protein, 9 aa, synthetic construct
ARASCPHLL

SEQ ID NO: 22133 - protein, 9 aa, synthetic construct
TEVSVPETL

SEQ ID NO: 22134 - protein, 9 aa, synthetic construct
STDIPISLR

SEQ ID NO: 22135 - protein, 10 aa, synthetic construct
ESVTHAFEGP

SEQ ID NO: 22136 - protein, 9 aa, synthetic construct
SSEISVHWE

SEQ ID NO: 22137 - protein, 9 aa, synthetic construct
VVPTLDSVL

SEQ ID NO: 22138 - protein, 11 aa, synthetic construct
IGGTDTLEGGW

SEQ ID NO: 22139 - protein, 10 aa, synthetic construct
TDFYIGGVSS

SEQ ID NO: 22140 - protein, 9 aa, synthetic construct
ATIMLMGDT

SEQ ID NO: 22141 - protein, 10 aa, synthetic construct
VSVMSSSNTG

SEQ ID NO: 22142 - protein, 9 aa, synthetic construct
SVSEPLVAA

SEQ ID NO: 22143 - protein, 10 aa, synthetic construct
SSTAFSTVMA

SEQ ID NO: 22144 - protein, 8 aa, synthetic construct
HFSMWLAA

SEQ ID NO: 22145 - protein, 9 aa, synthetic construct
DTMLKKMSA

SEQ ID NO: 22146 - protein, 9 aa, synthetic construct
SEVTVRFES

SEQ ID NO: 22147 - protein, 9 aa, synthetic construct
ESFQLVEVA

SEQ ID NO: 22148 - protein, 9 aa, synthetic construct
VESGKILTG

SEQ ID NO: 22149 - protein, 9 aa, synthetic construct
SDLLRHLLA

SEQ ID NO: 22150 - protein, 10 aa, synthetic construct
SEVAVLSPEK

SEQ ID NO: 22151 - protein, 10 aa, synthetic construct
SEVQNLKGAM

SEQ ID NO: 22152 - protein, 10 aa, synthetic construct
DNITLAQDIA

SEQ ID NO: 22153 - protein, 9 aa, synthetic construct
QVESYIAEQ

SEQ ID NO: 22154 - protein, 10 aa, synthetic construct
SESLFLASHA

SEQ ID NO: 22155 - protein, 9 aa, synthetic construct
TSIDSVTLA

SEQ ID NO: 22156 - protein, 9 aa, synthetic construct
WEDSGLVSL

SEQ ID NO: 22157 - protein, 9 aa, synthetic construct
ALSGYCCVA

SEQ ID NO: 22158 - protein, 11 aa, synthetic construct
PAMADKMDMSL

SEQ ID NO: 22159 - protein, 11 aa, synthetic construct
DLEDDVHSSSA

SEQ ID NO: 22160 - protein, 13 aa, synthetic construct
HAAGTTAGGSAVM

SEQ ID NO: 22161 - protein, 10 aa, synthetic construct
PVQGGDPSEN

SEQ ID NO: 22162 - protein, 9 aa, synthetic construct
TTEFLLYVN

SEQ ID NO: 22163 - protein, 9 aa, synthetic construct
FSHLTEGEL

SEQ ID NO: 22164 - protein, 9 aa, synthetic construct
SSAADFSGF

SEQ ID NO: 22165 - protein, 9 aa, synthetic construct
TATSDFCLW

SEQ ID NO: 22166 - protein, 9 aa, synthetic construct
VEFGSLEAL

SEQ ID NO: 22167 - protein, 9 aa, synthetic construct
TMQYPSQQF

SEQ ID NO: 22168 - protein, 9 aa, synthetic construct
EFETALACV

SEQ ID NO: 22169 - protein, 10 aa, synthetic construct
SFDDAFKADS

SEQ ID NO: 22170 - protein, 9 aa, synthetic construct
YADESFHFF

SEQ ID NO: 22171 - protein, 9 aa, synthetic construct
TSAYEDYDI

SEQ ID NO: 22172 - protein, 7 aa, synthetic construct
IQLYDAM

SEQ ID NO: 22173 - protein, 8 aa, synthetic construct
IYQVEAFD

SEQ ID NO: 22174 - protein, 9 aa, synthetic construct
ALSPTFSMM

SEQ ID NO: 22175 - protein, 8 aa, synthetic construct
YAGDLLMS

SEQ ID NO: 22176 - protein, 9 aa, synthetic construct
GDALYAMLM

SEQ ID NO: 22177 - protein, 8 aa, synthetic construct
SFDIFGRT

SEQ ID NO: 22178 - protein, 8 aa, synthetic construct
SFDLLFWK

SEQ ID NO: 22179 - protein, 9 aa, synthetic construct
SFVLNTVLL

SEQ ID NO: 22180 - protein, 9 aa, synthetic construct
AYDAQVFRL

SEQ ID NO: 22181 - protein, 10 aa, synthetic construct
AYEVLVMLAD

SEQ ID NO: 22182 - protein, 9 aa, synthetic construct
YGEIVIKNL

SEQ ID NO: 22183 - protein, 9 aa, synthetic construct
DSYAAISQV

SEQ ID NO: 22184 - protein, 8 aa, synthetic construct
AYPNLIFS

SEQ ID NO: 22185 - protein, 9 aa, synthetic construct
SSTPYSPVI

SEQ ID NO: 22186 - protein, 9 aa, synthetic construct
DFASSFFST

SEQ ID NO: 22187 - protein, 10 aa, synthetic construct
SFGGIPAPGK

SEQ ID NO: 22188 - protein, 8 aa, synthetic construct
SFKELHAV

SEQ ID NO: 22189 - protein, 9 aa, synthetic construct
AADSYFSLL

SEQ ID NO: 22190 - protein, 7 aa, synthetic construct
SFQGNFG

SEQ ID NO: 22191 - protein, 9 aa, synthetic construct
FGGGTGGFG

SEQ ID NO: 22192 - protein, 9 aa, synthetic construct
GSFGAGGGF

SEQ ID NO: 22193 - protein, 10 aa, synthetic construct
PRDPNGAGSE

SEQ ID NO: 22194 - protein, 8 aa, synthetic construct
FSGGSGFG

SEQ ID NO: 22195 - protein, 9 aa, synthetic construct
GFSGGSGFG

SEQ ID NO: 22196 - protein, 10 aa, synthetic construct
GSFGGGSFGG

SEQ ID NO: 22197 - protein, 10 aa, synthetic construct
FGGGSSFGGG

SEQ ID NO: 22198 - protein, 9 aa, synthetic construct
FSSGGGFGN

SEQ ID NO: 22199 - protein, 7 aa, synthetic construct
SGFGNSF

SEQ ID NO: 22200 - protein, 7 aa, synthetic construct
GFSPQHK

SEQ ID NO: 22201 - protein, 10 aa, synthetic construct
AWGGLGPRKE

SEQ ID NO: 22202 - protein, 9 aa, synthetic construct
SFLHLSNRP

SEQ ID NO: 22203 - protein, 9 aa, synthetic construct
LPLHCDQSF

SEQ ID NO: 22204 - protein, 8 aa, synthetic construct
AYVKVHTV

SEQ ID NO: 22205 - protein, 9 aa, synthetic construct
IFVSIAQSE

SEQ ID NO: 22206 - protein, 10 aa, synthetic construct
TVIFVATGEG

SEQ ID NO: 22207 - protein, 10 aa, synthetic construct
AYVLASLAGE

SEQ ID NO: 22208 - protein, 9 aa, synthetic construct
LFLSELSSI

SEQ ID NO: 22209 - protein, 8 aa, synthetic construct
FSLVPLSI

SEQ ID NO: 22210 - protein, 10 aa, synthetic construct
LPDHINIVLK

SEQ ID NO: 22211 - protein, 9 aa, synthetic construct
VLKRYQNLK

SEQ ID NO: 22212 - protein, 9 aa, synthetic construct
SSTLRKHEI

SEQ ID NO: 22213 - protein, 9 aa, synthetic construct
ILQYSEDNS

SEQ ID NO: 22214 - protein, 9 aa, synthetic construct
YALKEENDS

SEQ ID NO: 22215 - protein, 8 aa, synthetic construct
SFSLQDQA

SEQ ID NO: 22216 - protein, 10 aa, synthetic construct
FSVDNIMTSL

SEQ ID NO: 22217 - protein, 10 aa, synthetic construct
YAVFYPPNGV

SEQ ID NO: 22218 - protein, 10 aa, synthetic construct
SFVPSTFEGR

SEQ ID NO: 22219 - protein, 10 aa, synthetic construct
FSLSQNRGTV

SEQ ID NO: 22220 - protein, 8 aa, synthetic construct
SFITRKYL

SEQ ID NO: 22221 - protein, 7 aa, synthetic construct
HTNSPVR

SEQ ID NO: 22222 - protein, 9 aa, synthetic construct
AGSYTLHIV

SEQ ID NO: 22223 - protein, 9 aa, synthetic construct
DSAVLLAYD

SEQ ID NO: 22224 - protein, 8 aa, synthetic construct
SYQPTYTY

SEQ ID NO: 22225 - protein, 10 aa, synthetic construct
FSGDVASQVY

SEQ ID NO: 22226 - protein, 7 aa, synthetic construct
SFSNYNS

SEQ ID NO: 22227 - protein, 9 aa, synthetic construct
FSGGSGFGS

SEQ ID NO: 22228 - protein, 9 aa, synthetic construct
GGFSSGGFS

SEQ ID NO: 22229 - protein, 9 aa, synthetic construct
MSPRALAEK

SEQ ID NO: 22230 - protein, 10 aa, synthetic construct
GGSYGGIFGG

SEQ ID NO: 22231 - protein, 8 aa, synthetic construct
KEQRKVYL

SEQ ID NO: 22232 - protein, 8 aa, synthetic construct
GSLKKISI

SEQ ID NO: 22233 - protein, 9 aa, synthetic construct
SGSNTSTGF

SEQ ID NO: 22234 - protein, 10 aa, synthetic construct
SGLRCLLECL

SEQ ID NO: 22235 - protein, 13 aa, synthetic construct
SGLMDGKGGGKDV

SEQ ID NO: 22236 - protein, 13 aa, synthetic construct
APLDHLAGEGPSG

SEQ ID NO: 22237 - protein, 9 aa, synthetic construct
AAPQSVCAL

SEQ ID NO: 22238 - protein, 10 aa, synthetic construct
SSPGPVEILT

SEQ ID NO: 22239 - protein, 10 aa, synthetic construct
SGPLTWRLTP

SEQ ID NO: 22240 - protein, 11 aa, synthetic construct
SGPRQLVGTGR

SEQ ID NO: 22241 - protein, 10 aa, synthetic construct
SGPDQRLRKA

SEQ ID NO: 22242 - protein, 9 aa, synthetic construct
SPGPVSAAI

SEQ ID NO: 22243 - protein, 9 aa, synthetic construct
ILNSPHHTV

SEQ ID NO: 22244 - protein, 9 aa, synthetic construct
SGMSGRKRK

SEQ ID NO: 22245 - protein, 9 aa, synthetic construct
NMKDAKDKL

SEQ ID NO: 22246 - protein, 10 aa, synthetic construct
ATGQMNLTKV

SEQ ID NO: 22247 - protein, 9 aa, synthetic construct
SHAIFTIHL

SEQ ID NO: 22248 - protein, 10 aa, synthetic construct
EHTLLHRLFL

SEQ ID NO: 22249 - protein, 11 aa, synthetic construct
HIVSVDEHLRE

SEQ ID NO: 22250 - protein, 9 aa, synthetic construct
LSAAASATL

SEQ ID NO: 22251 - protein, 10 aa, synthetic construct
FADVQCTVNL

SEQ ID NO: 22252 - protein, 8 aa, synthetic construct
DTVRRLVL

SEQ ID NO: 22253 - protein, 9 aa, synthetic construct
PEGTESVLV

SEQ ID NO: 22254 - protein, 9 aa, synthetic construct
SLSDEAPVL

SEQ ID NO: 22255 - protein, 9 aa, synthetic construct
SLAKDELGY

SEQ ID NO: 22256 - protein, 10 aa, synthetic construct
SILCVTSIAK

SEQ ID NO: 22257 - protein, 10 aa, synthetic construct
ISFDKRAAAL

SEQ ID NO: 22258 - protein, 10 aa, synthetic construct
TVPFTARTAK

SEQ ID NO: 22259 - protein, 10 aa, synthetic construct
ISFIKDFLAK

SEQ ID NO: 22260 - protein, 10 aa, synthetic construct
TLTKLGNTIS

SEQ ID NO: 22261 - protein, 10 aa, synthetic construct
KTLTRAGTLS

SEQ ID NO: 22262 - protein, 8 aa, synthetic construct
LFSQSASL

SEQ ID NO: 22263 - protein, 10 aa, synthetic construct
LSFSPLPGNI

SEQ ID NO: 22264 - protein, 9 aa, synthetic construct
LSFSDIIHL

SEQ ID NO: 22265 - protein, 10 aa, synthetic construct
VTFVMLLPSK

SEQ ID NO: 22266 - protein, 10 aa, synthetic construct
SLLALLHSLP

SEQ ID NO: 22267 - protein, 11 aa, synthetic construct
GSLGIVSNNSV

SEQ ID NO: 22268 - protein, 9 aa, synthetic construct
SLLLRIGEV

SEQ ID NO: 22269 - protein, 9 aa, synthetic construct
LSLHLNRIL

SEQ ID NO: 22270 - protein, 10 aa, synthetic construct
ISIVGGQTVI

SEQ ID NO: 22271 - protein, 10 aa, synthetic construct
SILKDKEPIK

SEQ ID NO: 22272 - protein, 9 aa, synthetic construct
MISTLKKIS

SEQ ID NO: 22273 - protein, 9 aa, synthetic construct
SIVEDGLMV

SEQ ID NO: 22274 - protein, 9 aa, synthetic construct
SLLVERNRS

SEQ ID NO: 22275 - protein, 9 aa, synthetic construct
IIESDPVTP

SEQ ID NO: 22276 - protein, 9 aa, synthetic construct
LSELDSLPP

SEQ ID NO: 22277 - protein, 11 aa, synthetic construct
SLLFAYTEKAM

SEQ ID NO: 22278 - protein, 13 aa, synthetic construct
SLLFRGPAGGSPD

SEQ ID NO: 22279 - protein, 9 aa, synthetic construct
TVLPFQIAK

SEQ ID NO: 22280 - protein, 10 aa, synthetic construct
LLSPAAVAFK

SEQ ID NO: 22281 - protein, 10 aa, synthetic construct
TVVQRPSLKN

SEQ ID NO: 22282 - protein, 10 aa, synthetic construct
SLISVAVTKI

SEQ ID NO: 22283 - protein, 9 aa, synthetic construct
SINGIPCIL

SEQ ID NO: 22284 - protein, 9 aa, synthetic construct
QTVNITAGF

SEQ ID NO: 22285 - protein, 9 aa, synthetic construct
ATQADLMEL

SEQ ID NO: 22286 - protein, 9 aa, synthetic construct
VNEGSLMEL

SEQ ID NO: 22287 - protein, 9 aa, synthetic construct
TVVAPEQNL

SEQ ID NO: 22288 - protein, 10 aa, synthetic construct
LSPRSPALPP

SEQ ID NO: 22289 - protein, 7 aa, synthetic construct
SLPKLDL

SEQ ID NO: 22290 - protein, 9 aa, synthetic construct
VTNTVTNAI

SEQ ID NO: 22291 - protein, 9 aa, synthetic construct
RAALDSGAF

SEQ ID NO: 22292 - protein, 9 aa, synthetic construct
ISSLGVSYM

SEQ ID NO: 22293 - protein, 9 aa, synthetic construct
ATGISVSAY

SEQ ID NO: 22294 - protein, 9 aa, synthetic construct
SLLSPVIYL

SEQ ID NO: 22295 - protein, 9 aa, synthetic construct
SLTLTAPSL

SEQ ID NO: 22296 - protein, 9 aa, synthetic construct
AVCTSESVY

SEQ ID NO: 22297 - protein, 9 aa, synthetic construct
FISVTSLTK

SEQ ID NO: 22298 - protein, 10 aa, synthetic construct
VTPEKFPTFP

SEQ ID NO: 22299 - protein, 9 aa, synthetic construct
LKDEMDLYK

SEQ ID NO: 22300 - protein, 9 aa, synthetic construct
STAAFFLLR

SEQ ID NO: 22301 - protein, 9 aa, synthetic construct
SIYPSASVP

SEQ ID NO: 22302 - protein, 9 aa, synthetic construct
LKFKTIYIS

SEQ ID NO: 22303 - protein, 9 aa, synthetic construct
KYYVLKVIS

SEQ ID NO: 22304 - protein, 8 aa, synthetic construct
NVSFSVFN

SEQ ID NO: 22305 - protein, 11 aa, synthetic construct
PPGVVNIVPGY

SEQ ID NO: 22306 - protein, 10 aa, synthetic construct
YSKGKIYPVG

SEQ ID NO: 22307 - protein, 11 aa, synthetic construct
LSEGALMASSV

SEQ ID NO: 22308 - protein, 11 aa, synthetic construct
ALDASISGSPY

SEQ ID NO: 22309 - protein, 11 aa, synthetic construct
SLDALPPGSPP

SEQ ID NO: 22310 - protein, 10 aa, synthetic construct
VLGLESLGWA

SEQ ID NO: 22311 - protein, 10 aa, synthetic construct
KEELENGEGV

SEQ ID NO: 22312 - protein, 9 aa, synthetic construct
SLAEFADKL

SEQ ID NO: 22313 - protein, 10 aa, synthetic construct
AISILLKGLS

SEQ ID NO: 22314 - protein, 9 aa, synthetic construct
SVALEIQQL

SEQ ID NO: 22315 - protein, 9 aa, synthetic construct
AGAVSLLGV

SEQ ID NO: 22316 - protein, 12 aa, synthetic construct
SLAGLGIAGALT

SEQ ID NO: 22317 - protein, 9 aa, synthetic construct
KEFASILGQ

SEQ ID NO: 22318 - protein, 9 aa, synthetic construct
YEAAKLLNV

SEQ ID NO: 22319 - protein, 9 aa, synthetic construct
SAQLYLTPK

SEQ ID NO: 22320 - protein, 9 aa, synthetic construct
LVTGTIVVS

SEQ ID NO: 22321 - protein, 9 aa, synthetic construct
IISVTAVVS

SEQ ID NO: 22322 - protein, 10 aa, synthetic construct
SLGLGESLYI

SEQ ID NO: 22323 - protein, 9 aa, synthetic construct
LLDDSTINV

SEQ ID NO: 22324 - protein, 9 aa, synthetic construct
TLDDAQFVL

SEQ ID NO: 22325 - protein, 9 aa, synthetic construct
VTLIYNASV

SEQ ID NO: 22326 - protein, 9 aa, synthetic construct
LDTPLSPSV

SEQ ID NO: 22327 - protein, 10 aa, synthetic construct
FTAELGLSPD

SEQ ID NO: 22328 - protein, 10 aa, synthetic construct
TLSEALSAEE

SEQ ID NO: 22329 - protein, 10 aa, synthetic construct
LDTEAPTRLS

SEQ ID NO: 22330 - protein, 9 aa, synthetic construct
PDITLLEPV

SEQ ID NO: 22331 - protein, 10 aa, synthetic construct
SIFAPHALPN

SEQ ID NO: 22332 - protein, 11 aa, synthetic construct
SIFGVKNKGDG

SEQ ID NO: 22333 - protein, 9 aa, synthetic construct
EVFTELMQV

SEQ ID NO: 22334 - protein, 9 aa, synthetic construct
MSSIISWYL

SEQ ID NO: 22335 - protein, 9 aa, synthetic construct
LSELRFVLV

SEQ ID NO: 22336 - protein, 8 aa, synthetic construct
FKEGSVKL

SEQ ID NO: 22337 - protein, 9 aa, synthetic construct
SIFGVVGNL

SEQ ID NO: 22338 - protein, 9 aa, synthetic construct
IRFKSYLLS

SEQ ID NO: 22339 - protein, 10 aa, synthetic construct
FVTGPVLASV

SEQ ID NO: 22340 - protein, 11 aa, synthetic construct
SLFPALASLAV

SEQ ID NO: 22341 - protein, 9 aa, synthetic construct
SLFEIVVRP

SEQ ID NO: 22342 - protein, 8 aa, synthetic construct
GNSLFGNS

SEQ ID NO: 22343 - protein, 8 aa, synthetic construct
SLGNFERE

SEQ ID NO: 22344 - protein, 7 aa, synthetic construct
SINYQSG

SEQ ID NO: 22345 - protein, 9 aa, synthetic construct
SLPGVVAVG

SEQ ID NO: 22346 - protein, 9 aa, synthetic construct
TTTVPHMLV

SEQ ID NO: 22347 - protein, 9 aa, synthetic construct
SLHSKFIRV

SEQ ID NO: 22348 - protein, 10 aa, synthetic construct
TSAALLDTAL

SEQ ID NO: 22349 - protein, 8 aa, synthetic construct
LLSERWTA

SEQ ID NO: 22350 - protein, 9 aa, synthetic construct
LASVGAASI

SEQ ID NO: 22351 - protein, 10 aa, synthetic construct
SLHGLLSAAL

SEQ ID NO: 22352 - protein, 9 aa, synthetic construct
ISPPRPTTL

SEQ ID NO: 22353 - protein, 9 aa, synthetic construct
LSLQKPRLL

SEQ ID NO: 22354 - protein, 9 aa, synthetic construct
LSLPLVGSL

SEQ ID NO: 22355 - protein, 9 aa, synthetic construct
LSIQRVEIQ

SEQ ID NO: 22356 - protein, 9 aa, synthetic construct
TVTTVILEV

SEQ ID NO: 22357 - protein, 11 aa, synthetic construct
SLLHLKPAGLT

SEQ ID NO: 22358 - protein, 10 aa, synthetic construct
SSLVAKIYRL

SEQ ID NO: 22359 - protein, 10 aa, synthetic construct
SLKTAIMSFI

SEQ ID NO: 22360 - protein, 9 aa, synthetic construct
TVKDLTAKY

SEQ ID NO: 22361 - protein, 9 aa, synthetic construct
LSKLQEVSL

SEQ ID NO: 22362 - protein, 9 aa, synthetic construct
LVRQVFKSL

SEQ ID NO: 22363 - protein, 9 aa, synthetic construct
SLVTKSVKV

SEQ ID NO: 22364 - protein, 10 aa, synthetic construct
LLASPAGSAG

SEQ ID NO: 22365 - protein, 10 aa, synthetic construct
LSLDPSHERA

SEQ ID NO: 22366 - protein, 10 aa, synthetic construct
ISIDHSQSLK

SEQ ID NO: 22367 - protein, 10 aa, synthetic construct
SIIDIVVSLA

SEQ ID NO: 22368 - protein, 9 aa, synthetic construct
LSLLDPLWT

SEQ ID NO: 22369 - protein, 9 aa, synthetic construct
VELSPVPID

SEQ ID NO: 22370 - protein, 10 aa, synthetic construct
FKQVQTLAVT

SEQ ID NO: 22371 - protein, 10 aa, synthetic construct
SILDLCYTTT

SEQ ID NO: 22372 - protein, 10 aa, synthetic construct
LSIASVISGI

SEQ ID NO: 22373 - protein, 9 aa, synthetic construct
DLLTYTKNI

SEQ ID NO: 22374 - protein, 11 aa, synthetic construct
ISELETAQKLL

SEQ ID NO: 22375 - protein, 8 aa, synthetic construct
LYQLVYKL

SEQ ID NO: 22376 - protein, 9 aa, synthetic construct
VQTVAEISV

SEQ ID NO: 22377 - protein, 10 aa, synthetic construct
SLLASADAVV

SEQ ID NO: 22378 - protein, 9 aa, synthetic construct
LSLPFHEPV

SEQ ID NO: 22379 - protein, 9 aa, synthetic construct
LSLHTSVRF

SEQ ID NO: 22380 - protein, 9 aa, synthetic construct
VLTPVALEL

SEQ ID NO: 22381 - protein, 9 aa, synthetic construct
LSVPSLAPL

SEQ ID NO: 22382 - protein, 9 aa, synthetic construct
LSLITPSPR

SEQ ID NO: 22383 - protein, 9 aa, synthetic construct
VLITMLPMI

SEQ ID NO: 22384 - protein, 9 aa, synthetic construct
EAKIPLNLD

SEQ ID NO: 22385 - protein, 11 aa, synthetic construct
GVATLPIGGVE

SEQ ID NO: 22386 - protein, 11 aa, synthetic construct
SLLAGPLDLGG

SEQ ID NO: 22387 - protein, 11 aa, synthetic construct
LEKAINPLLDD

SEQ ID NO: 22388 - protein, 13 aa, synthetic construct
QLSGALLGLTGDL

SEQ ID NO: 22389 - protein, 11 aa, synthetic construct
LDNLPSLQIEV

SEQ ID NO: 22390 - protein, 11 aa, synthetic construct
SLLQPLNITQV

SEQ ID NO: 22391 - protein, 11 aa, synthetic construct
LLSQNLVVKPD

SEQ ID NO: 22392 - protein, 10 aa, synthetic construct
VTLQPSPLLP

SEQ ID NO: 22393 - protein, 9 aa, synthetic construct
LLSSLNDEV

SEQ ID NO: 22394 - protein, 10 aa, synthetic construct
TVMEERMIEV

SEQ ID NO: 22395 - protein, 10 aa, synthetic construct
LSPAIPLEAL

SEQ ID NO: 22396 - protein, 10 aa, synthetic construct
PTVFDENESL

SEQ ID NO: 22397 - protein, 9 aa, synthetic construct
LSNNTSISY

SEQ ID NO: 22398 - protein, 10 aa, synthetic construct
MLATPSISVY

SEQ ID NO: 22399 - protein, 9 aa, synthetic construct
IDEMKISYV

SEQ ID NO: 22400 - protein, 9 aa, synthetic construct
LSGEDLALT

SEQ ID NO: 22401 - protein, 10 aa, synthetic construct
QTGSFKQLTV

SEQ ID NO: 22402 - protein, 9 aa, synthetic construct
SILPFLSLL

SEQ ID NO: 22403 - protein, 10 aa, synthetic construct
ISLPLPNFSS

SEQ ID NO: 22404 - protein, 8 aa, synthetic construct
ISLPLVYL

SEQ ID NO: 22405 - protein, 9 aa, synthetic construct
PSLKQDLIS

SEQ ID NO: 22406 - protein, 9 aa, synthetic construct
SLSQNKSAL

SEQ ID NO: 22407 - protein, 9 aa, synthetic construct
SLLPRMSVS

SEQ ID NO: 22408 - protein, 11 aa, synthetic construct
SVRGINGSISL

SEQ ID NO: 22409 - protein, 9 aa, synthetic construct
TTRQNKLSL

SEQ ID NO: 22410 - protein, 9 aa, synthetic construct
LPSSFPTSL

SEQ ID NO: 22411 - protein, 10 aa, synthetic construct
EALAKLSLLS

SEQ ID NO: 22412 - protein, 10 aa, synthetic construct
SLGIRKPVTI

SEQ ID NO: 22413 - protein, 10 aa, synthetic construct
VTIMKMEVTI

SEQ ID NO: 22414 - protein, 9 aa, synthetic construct
SLNEEINRL

SEQ ID NO: 22415 - protein, 9 aa, synthetic construct
ISEEQIAIF

SEQ ID NO: 22416 - protein, 10 aa, synthetic construct
LEDATLGAFL

SEQ ID NO: 22417 - protein, 10 aa, synthetic construct
ATGLDGSYLL

SEQ ID NO: 22418 - protein, 9 aa, synthetic construct
KEATELQSI

SEQ ID NO: 22419 - protein, 9 aa, synthetic construct
TKAESLIGV

SEQ ID NO: 22420 - protein, 8 aa, synthetic construct
SLNLHRDP

SEQ ID NO: 22421 - protein, 9 aa, synthetic construct
SVELSVLSL

SEQ ID NO: 22422 - protein, 9 aa, synthetic construct
VTSLEKSLI

SEQ ID NO: 22423 - protein, 10 aa, synthetic construct
TVSTVGISII

SEQ ID NO: 22424 - protein, 10 aa, synthetic construct
LSSADLSSLS

SEQ ID NO: 22425 - protein, 11 aa, synthetic construct
VTTVLTMTTLS

SEQ ID NO: 22426 - protein, 10 aa, synthetic construct
TLSEELAYLK

SEQ ID NO: 22427 - protein, 9 aa, synthetic construct
LATETVTFV

SEQ ID NO: 22428 - protein, 9 aa, synthetic construct
SLVIEHILV

SEQ ID NO: 22429 - protein, 9 aa, synthetic construct
LDKLQSKSL

SEQ ID NO: 22430 - protein, 10 aa, synthetic construct
LSVGTSSAKL

SEQ ID NO: 22431 - protein, 8 aa, synthetic construct
VTNVIGGS

SEQ ID NO: 22432 - protein, 11 aa, synthetic construct
TVVAVGSGSKG

SEQ ID NO: 22433 - protein, 10 aa, synthetic construct
SPTKLSNKSL

SEQ ID NO: 22434 - protein, 10 aa, synthetic construct
LVSNLKKEGS

SEQ ID NO: 22435 - protein, 9 aa, synthetic construct
QCLLGPAEA

SEQ ID NO: 22436 - protein, 9 aa, synthetic construct
VQIDDSYLV

SEQ ID NO: 22437 - protein, 10 aa, synthetic construct
IASANYMLSE

SEQ ID NO: 22438 - protein, 11 aa, synthetic construct
TVAANSSFSQS

SEQ ID NO: 22439 - protein, 9 aa, synthetic construct
VTYVLWMTA

SEQ ID NO: 22440 - protein, 9 aa, synthetic construct
SYLKNQMLS

SEQ ID NO: 22441 - protein, 7 aa, synthetic construct
TVWFEVV

SEQ ID NO: 22442 - protein, 8 aa, synthetic construct
TVYTNTLL

SEQ ID NO: 22443 - protein, 9 aa, synthetic construct
LSLYGTGTI

SEQ ID NO: 22444 - protein, 11 aa, synthetic construct
IVVGLGCGLLY

SEQ ID NO: 22445 - protein, 9 aa, synthetic construct
TVYAVPILI

SEQ ID NO: 22446 - protein, 11 aa, synthetic construct
ISYTDSSINFL

SEQ ID NO: 22447 - protein, 10 aa, synthetic construct
TVQYRMHPDI

SEQ ID NO: 22448 - protein, 10 aa, synthetic construct
SIYMRQEGFL

SEQ ID NO: 22449 - protein, 11 aa, synthetic construct
ISPSGEWIEEL

SEQ ID NO: 22450 - protein, 10 aa, synthetic construct
LSYTQQMEDL

SEQ ID NO: 22451 - protein, 9 aa, synthetic construct
SMREQALLK

SEQ ID NO: 22452 - protein, 9 aa, synthetic construct
IMSHLFSKL

SEQ ID NO: 22453 - protein, 9 aa, synthetic construct
VSYPLSLEL

SEQ ID NO: 22454 - protein, 10 aa, synthetic construct
SMIDPPRSTV

SEQ ID NO: 22455 - protein, 11 aa, synthetic construct
SLMCAAKGAPP

SEQ ID NO: 22456 - protein, 9 aa, synthetic construct
LSIHSMAEL

SEQ ID NO: 22457 - protein, 9 aa, synthetic construct
ISEAFVKIP

SEQ ID NO: 22458 - protein, 10 aa, synthetic construct
SLALSVGIFP

SEQ ID NO: 22459 - protein, 10 aa, synthetic construct
GEVGSNVPFL

SEQ ID NO: 22460 - protein, 9 aa, synthetic construct
MAPTVATGL

SEQ ID NO: 22461 - protein, 8 aa, synthetic construct
DPFSSPLL

SEQ ID NO: 22462 - protein, 9 aa, synthetic construct
LFSFMAMTA

SEQ ID NO: 22463 - protein, 10 aa, synthetic construct
LVQAACSGGY

SEQ ID NO: 22464 - protein, 8 aa, synthetic construct
SHNIRRFM

SEQ ID NO: 22465 - protein, 10 aa, synthetic construct
SNLDKALHSA

SEQ ID NO: 22466 - protein, 8 aa, synthetic construct
SQVVIPIL

SEQ ID NO: 22467 - protein, 8 aa, synthetic construct
FALHNKSF

SEQ ID NO: 22468 - protein, 10 aa, synthetic construct
SLSPMGRYVM

SEQ ID NO: 22469 - protein, 10 aa, synthetic construct
GEMKSGVPVL

SEQ ID NO: 22470 - protein, 11 aa, synthetic construct
GAWNETKEILG

SEQ ID NO: 22471 - protein, 13 aa, synthetic construct
GSRDSPASASLVA

SEQ ID NO: 22472 - protein, 11 aa, synthetic construct
MGPPWPFSILG

SEQ ID NO: 22473 - protein, 11 aa, synthetic construct
LDPMELKGEGL

SEQ ID NO: 22474 - protein, 12 aa, synthetic construct
DGNGSQIRSLGL

SEQ ID NO: 22475 - protein, 9 aa, synthetic construct
TGSVGPTVL

SEQ ID NO: 22476 - protein, 10 aa, synthetic construct
TQGSPGLEDY

SEQ ID NO: 22477 - protein, 8 aa, synthetic construct
SPEAIKQL

SEQ ID NO: 22478 - protein, 9 aa, synthetic construct
HCLRTYATI

SEQ ID NO: 22479 - protein, 10 aa, synthetic construct
SPAEAKSPEK

SEQ ID NO: 22480 - protein, 9 aa, synthetic construct
SPASFLRSL

SEQ ID NO: 22481 - protein, 8 aa, synthetic construct
SPAVQIKI

SEQ ID NO: 22482 - protein, 8 aa, synthetic construct
PSQPLLSL

SEQ ID NO: 22483 - protein, 8 aa, synthetic construct
NIPSSATI

SEQ ID NO: 22484 - protein, 9 aa, synthetic construct
LNLVHGVFY

SEQ ID NO: 22485 - protein, 9 aa, synthetic construct
SPALIRGLG

SEQ ID NO: 22486 - protein, 10 aa, synthetic construct
SPASLVGLRI

SEQ ID NO: 22487 - protein, 9 aa, synthetic construct
SPAKNKKTL

SEQ ID NO: 22488 - protein, 9 aa, synthetic construct
SLPAKLPGL

SEQ ID NO: 22489 - protein, 9 aa, synthetic construct
GTPLSPGSL

SEQ ID NO: 22490 - protein, 9 aa, synthetic construct
SPQPGAHLL

SEQ ID NO: 22491 - protein, 9 aa, synthetic construct
SPATSPITI

SEQ ID NO: 22492 - protein, 9 aa, synthetic construct
SPATPTLLS

SEQ ID NO: 22493 - protein, 9 aa, synthetic construct
PSPAVPSIY

SEQ ID NO: 22494 - protein, 9 aa, synthetic construct
QGKSVTNSF

SEQ ID NO: 22495 - protein, 10 aa, synthetic construct
TGPQFVSGVI

SEQ ID NO: 22496 - protein, 9 aa, synthetic construct
SPQVIMAPF

SEQ ID NO: 22497 - protein, 9 aa, synthetic construct
LYDEKADVF

SEQ ID NO: 22498 - protein, 9 aa, synthetic construct
PSASPLKSI

SEQ ID NO: 22499 - protein, 8 aa, synthetic construct
KPEAASPF

SEQ ID NO: 22500 - protein, 11 aa, synthetic construct
SPGLCVLLLSL

SEQ ID NO: 22501 - protein, 8 aa, synthetic construct
SPAKLVRL

SEQ ID NO: 22502 - protein, 12 aa, synthetic construct
SAPPGPPAGAAA

SEQ ID NO: 22503 - protein, 10 aa, synthetic construct
SSMETSSLEL

SEQ ID NO: 22504 - protein, 10 aa, synthetic construct
GTQQGRATNY

SEQ ID NO: 22505 - protein, 12 aa, synthetic construct
TADGTPSSTSTY

SEQ ID NO: 22506 - protein, 8 aa, synthetic construct
HHHSVPVF

SEQ ID NO: 22507 - protein, 10 aa, synthetic construct
SPDASNKLAR

SEQ ID NO: 22508 - protein, 10 aa, synthetic construct
EDETIDAEVM

SEQ ID NO: 22509 - protein, 8 aa, synthetic construct
EDPTQIVY

SEQ ID NO: 22510 - protein, 11 aa, synthetic construct
SPAAALERDAL

SEQ ID NO: 22511 - protein, 9 aa, synthetic construct
SPRLSEIWL

SEQ ID NO: 22512 - protein, 9 aa, synthetic construct
ALVPPSADY

SEQ ID NO: 22513 - protein, 10 aa, synthetic construct
NGQFKEKVIL

SEQ ID NO: 22514 - protein, 10 aa, synthetic construct
PSDLPSGKSR

SEQ ID NO: 22515 - protein, 9 aa, synthetic construct
YSPDPSIYA

SEQ ID NO: 22516 - protein, 11 aa, synthetic construct
STDPAALCKSE

SEQ ID NO: 22517 - protein, 9 aa, synthetic construct
SPEEKMMKR

SEQ ID NO: 22518 - protein, 9 aa, synthetic construct
SPEEEKRKH

SEQ ID NO: 22519 - protein, 11 aa, synthetic construct
RPLSYSNPVEY

SEQ ID NO: 22520 - protein, 11 aa, synthetic construct
ERPLQGYSVEY

SEQ ID NO: 22521 - protein, 8 aa, synthetic construct
SPEVLRKE

SEQ ID NO: 22522 - protein, 10 aa, synthetic construct
SACGALGLVF

SEQ ID NO: 22523 - protein, 8 aa, synthetic construct
HFELMSEW

SEQ ID NO: 22524 - protein, 8 aa, synthetic construct
SPFFREEK

SEQ ID NO: 22525 - protein, 9 aa, synthetic construct
SPFFRSEIG

SEQ ID NO: 22526 - protein, 10 aa, synthetic construct
SMLQDFLKEY

SEQ ID NO: 22527 - protein, 9 aa, synthetic construct
VIAFSPFGY

SEQ ID NO: 22528 - protein, 8 aa, synthetic construct
SPFKDMIL

SEQ ID NO: 22529 - protein, 9 aa, synthetic construct
SRQYQTAII

SEQ ID NO: 22530 - protein, 9 aa, synthetic construct
FDESLSMFT

SEQ ID NO: 22531 - protein, 9 aa, synthetic construct
LGMASDPIF

SEQ ID NO: 22532 - protein, 10 aa, synthetic construct
EGGPAVWPIY

SEQ ID NO: 22533 - protein, 9 aa, synthetic construct
SPFNLRHLF

SEQ ID NO: 22534 - protein, 10 aa, synthetic construct
SLMGLKTRGL

SEQ ID NO: 22535 - protein, 8 aa, synthetic construct
SPRFLLGL

SEQ ID NO: 22536 - protein, 9 aa, synthetic construct
LPFSLTSTM

SEQ ID NO: 22537 - protein, 10 aa, synthetic construct
FESPSNATIQ

SEQ ID NO: 22538 - protein, 9 aa, synthetic construct
SPFSGFTFQ

SEQ ID NO: 22539 - protein, 9 aa, synthetic construct
SPFTIYDIQ

SEQ ID NO: 22540 - protein, 9 aa, synthetic construct
SPFPSHPSL

SEQ ID NO: 22541 - protein, 11 aa, synthetic construct
MLSPSSLFSAF

SEQ ID NO: 22542 - protein, 12 aa, synthetic construct
SPHLNAANEFLY

SEQ ID NO: 22543 - protein, 9 aa, synthetic construct
SPDTHRVPY

SEQ ID NO: 22544 - protein, 9 aa, synthetic construct
PSFMMKKGL

SEQ ID NO: 22545 - protein, 10 aa, synthetic construct
IFSMMEVWLY

SEQ ID NO: 22546 - protein, 9 aa, synthetic construct
PSMPHKERY

SEQ ID NO: 22547 - protein, 9 aa, synthetic construct
GPSLVGETF

SEQ ID NO: 22548 - protein, 9 aa, synthetic construct
SLSPRPSAL

SEQ ID NO: 22549 - protein, 9 aa, synthetic construct
SPEIINAAI

SEQ ID NO: 22550 - protein, 11 aa, synthetic construct
SARSPACSSSL

SEQ ID NO: 22551 - protein, 9 aa, synthetic construct
SPTRINGSI

SEQ ID NO: 22552 - protein, 9 aa, synthetic construct
SGPSSPAVL

SEQ ID NO: 22553 - protein, 7 aa, synthetic construct
RMARKPS

SEQ ID NO: 22554 - protein, 9 aa, synthetic construct
SPRSVPSRL

SEQ ID NO: 22555 - protein, 8 aa, synthetic construct
EEKEIIVI

SEQ ID NO: 22556 - protein, 9 aa, synthetic construct
PSHISANKL

SEQ ID NO: 22557 - protein, 8 aa, synthetic construct
ASRSFPSL

SEQ ID NO: 22558 - protein, 9 aa, synthetic construct
FGLDRIIDI

SEQ ID NO: 22559 - protein, 9 aa, synthetic construct
SPEVTLQLY

SEQ ID NO: 22560 - protein, 11 aa, synthetic construct
FEVPTSKSSNS

SEQ ID NO: 22561 - protein, 9 aa, synthetic construct
SPLGDSLKI

SEQ ID NO: 22562 - protein, 9 aa, synthetic construct
TVPGVMPQH

SEQ ID NO: 22563 - protein, 10 aa, synthetic construct
LIKLSSPATL

SEQ ID NO: 22564 - protein, 9 aa, synthetic construct
LVTPEPLTF

SEQ ID NO: 22565 - protein, 9 aa, synthetic construct
SLALPLSGL

SEQ ID NO: 22566 - protein, 11 aa, synthetic construct
SGANIDELITF

SEQ ID NO: 22567 - protein, 9 aa, synthetic construct
LSPRVIQNI

SEQ ID NO: 22568 - protein, 9 aa, synthetic construct
PLSDPTCFS

SEQ ID NO: 22569 - protein, 10 aa, synthetic construct
SHLAIVDISY

SEQ ID NO: 22570 - protein, 9 aa, synthetic construct
LPSDPPEHF

SEQ ID NO: 22571 - protein, 11 aa, synthetic construct
ASQSAGITGSW

SEQ ID NO: 22572 - protein, 10 aa, synthetic construct
TIPNSDEGIF

SEQ ID NO: 22573 - protein, 9 aa, synthetic construct
SLPQPKSHL

SEQ ID NO: 22574 - protein, 12 aa, synthetic construct
PLSPISVHERYS

SEQ ID NO: 22575 - protein, 11 aa, synthetic construct
LASRVRPASLI

SEQ ID NO: 22576 - protein, 9 aa, synthetic construct
IPSLDSSQS

SEQ ID NO: 22577 - protein, 9 aa, synthetic construct
SPLTGKVNQ

SEQ ID NO: 22578 - protein, 10 aa, synthetic construct
ITPVSAVSLM

SEQ ID NO: 22579 - protein, 10 aa, synthetic construct
SFLPSHMLTF

SEQ ID NO: 22580 - protein, 10 aa, synthetic construct
VSVGMTTLVM

SEQ ID NO: 22581 - protein, 9 aa, synthetic construct
SPPPQLLTR

SEQ ID NO: 22582 - protein, 9 aa, synthetic construct
SIMKGRVML

SEQ ID NO: 22583 - protein, 9 aa, synthetic construct
IAQITVKAL

SEQ ID NO: 22584 - protein, 9 aa, synthetic construct
QLAIPVSSL

SEQ ID NO: 22585 - protein, 8 aa, synthetic construct
LRPSEPFL

SEQ ID NO: 22586 - protein, 9 aa, synthetic construct
SPKPSPTFM

SEQ ID NO: 22587 - protein, 9 aa, synthetic construct
SPVCLSVLL

SEQ ID NO: 22588 - protein, 10 aa, synthetic construct
LGRAALDLAI

SEQ ID NO: 22589 - protein, 8 aa, synthetic construct
SPKRVTVI

SEQ ID NO: 22590 - protein, 9 aa, synthetic construct
SPLALLRFS

SEQ ID NO: 22591 - protein, 9 aa, synthetic construct
PSLDLFRAS

SEQ ID NO: 22592 - protein, 9 aa, synthetic construct
SPDLESWCL

SEQ ID NO: 22593 - protein, 9 aa, synthetic construct
SIPRVRALL

SEQ ID NO: 22594 - protein, 11 aa, synthetic construct
STRSPASTWAY

SEQ ID NO: 22595 - protein, 11 aa, synthetic construct
SAWALMATQTF

SEQ ID NO: 22596 - protein, 8 aa, synthetic construct
YQKKAFQS

SEQ ID NO: 22597 - protein, 9 aa, synthetic construct
SPIVTSGLI

SEQ ID NO: 22598 - protein, 9 aa, synthetic construct
LSPISSISF

SEQ ID NO: 22599 - protein, 11 aa, synthetic construct
LVPNTINGNIY

SEQ ID NO: 22600 - protein, 9 aa, synthetic construct
SPIAARDLL

SEQ ID NO: 22601 - protein, 8 aa, synthetic construct
SPNLRQLL

SEQ ID NO: 22602 - protein, 9 aa, synthetic construct
LQAADSSAL

SEQ ID NO: 22603 - protein, 10 aa, synthetic construct
SSSPGSLGAI

SEQ ID NO: 22604 - protein, 10 aa, synthetic construct
GISGPSSASL

SEQ ID NO: 22605 - protein, 10 aa, synthetic construct
LPSLDLFWAF

SEQ ID NO: 22606 - protein, 9 aa, synthetic construct
LSPPAPLGT

SEQ ID NO: 22607 - protein, 8 aa, synthetic construct
HRRSLGVY

SEQ ID NO: 22608 - protein, 9 aa, synthetic construct
IPSPELFSD

SEQ ID NO: 22609 - protein, 9 aa, synthetic construct
SPLPVYIWM

SEQ ID NO: 22610 - protein, 10 aa, synthetic construct
PLSSPAPSTF

SEQ ID NO: 22611 - protein, 10 aa, synthetic construct
SLPAFSGVAL

SEQ ID NO: 22612 - protein, 9 aa, synthetic construct
LPSEVQPVM

SEQ ID NO: 22613 - protein, 9 aa, synthetic construct
SPLNATSAL

SEQ ID NO: 22614 - protein, 9 aa, synthetic construct
DLMLSQYVY

SEQ ID NO: 22615 - protein, 9 aa, synthetic construct
TLSPQQAAF

SEQ ID NO: 22616 - protein, 9 aa, synthetic construct
SPKTSLLSL

SEQ ID NO: 22617 - protein, 8 aa, synthetic construct
SPLCGKRI

SEQ ID NO: 22618 - protein, 10 aa, synthetic construct
SSQQGSKAVY

SEQ ID NO: 22619 - protein, 9 aa, synthetic construct
SPENMMRHI

SEQ ID NO: 22620 - protein, 8 aa, synthetic construct
SPWLRIII

SEQ ID NO: 22621 - protein, 9 aa, synthetic construct
SPQLPKKSI

SEQ ID NO: 22622 - protein, 11 aa, synthetic construct
SPGGALPYPLL

SEQ ID NO: 22623 - protein, 10 aa, synthetic construct
SPQPVPSFLL

SEQ ID NO: 22624 - protein, 10 aa, synthetic construct
RGPSGILLDL

SEQ ID NO: 22625 - protein, 9 aa, synthetic construct
IRNLLDLPS

SEQ ID NO: 22626 - protein, 10 aa, synthetic construct
SPNSTNHVAL

SEQ ID NO: 22627 - protein, 11 aa, synthetic construct
QKPMEAPAAAL

SEQ ID NO: 22628 - protein, 9 aa, synthetic construct
SPLRVDLAV

SEQ ID NO: 22629 - protein, 10 aa, synthetic construct
SQNPSRLAVI

SEQ ID NO: 22630 - protein, 8 aa, synthetic construct
AQQEQLLL

SEQ ID NO: 22631 - protein, 9 aa, synthetic construct
EAQRVATEF

SEQ ID NO: 22632 - protein, 8 aa, synthetic construct
DMIGRCFV

SEQ ID NO: 22633 - protein, 10 aa, synthetic construct
LPPSIDAVYE

SEQ ID NO: 22634 - protein, 10 aa, synthetic construct
VPSPLSGSAL

SEQ ID NO: 22635 - protein, 11 aa, synthetic construct
SPFSPGPSPGM

SEQ ID NO: 22636 - protein, 9 aa, synthetic construct
PSVPLHESF

SEQ ID NO: 22637 - protein, 8 aa, synthetic construct
LQTLTHEV

SEQ ID NO: 22638 - protein, 11 aa, synthetic construct
SPAGRVTLSGI

SEQ ID NO: 22639 - protein, 10 aa, synthetic construct
SPAGDLLYSR

SEQ ID NO: 22640 - protein, 10 aa, synthetic construct
SPQDNALGLM

SEQ ID NO: 22641 - protein, 9 aa, synthetic construct
ASPNAGPLF

SEQ ID NO: 22642 - protein, 9 aa, synthetic construct
PSQMSVARI

SEQ ID NO: 22643 - protein, 9 aa, synthetic construct
SPWSSARTL

SEQ ID NO: 22644 - protein, 9 aa, synthetic construct
SPSPTQKML

SEQ ID NO: 22645 - protein, 9 aa, synthetic construct
SPRLMSNAL

SEQ ID NO: 22646 - protein, 10 aa, synthetic construct
SPSGTMKAVL

SEQ ID NO: 22647 - protein, 10 aa, synthetic construct
SPAVTKGLYI

SEQ ID NO: 22648 - protein, 10 aa, synthetic construct
SPQALVAMEK

SEQ ID NO: 22649 - protein, 10 aa, synthetic construct
SPGLAPRIYL

SEQ ID NO: 22650 - protein, 10 aa, synthetic construct
SPQPSTSRGL

SEQ ID NO: 22651 - protein, 9 aa, synthetic construct
SPQQGSLQL

SEQ ID NO: 22652 - protein, 9 aa, synthetic construct
SPQEREQFL

SEQ ID NO: 22653 - protein, 8 aa, synthetic construct
SPSQSGLL

SEQ ID NO: 22654 - protein, 10 aa, synthetic construct
GTPGNSSVPI

SEQ ID NO: 22655 - protein, 9 aa, synthetic construct
PSNTPGDAL

SEQ ID NO: 22656 - protein, 9 aa, synthetic construct
GVEGRGMVL

SEQ ID NO: 22657 - protein, 9 aa, synthetic construct
RDSPVPLTL

SEQ ID NO: 22658 - protein, 10 aa, synthetic construct
SAKHSEASVL

SEQ ID NO: 22659 - protein, 10 aa, synthetic construct
GLLSPERAVL

SEQ ID NO: 22660 - protein, 10 aa, synthetic construct
AGVVTMPQYL

SEQ ID NO: 22661 - protein, 8 aa, synthetic construct
LHMQVSLF

SEQ ID NO: 22662 - protein, 8 aa, synthetic construct
SYMLPPLF

SEQ ID NO: 22663 - protein, 8 aa, synthetic construct
PQRYPIGI

SEQ ID NO: 22664 - protein, 11 aa, synthetic construct
IGVPRTISEVQ

SEQ ID NO: 22665 - protein, 9 aa, synthetic construct
HRPSRPALL

SEQ ID NO: 22666 - protein, 11 aa, synthetic construct
LLWGFLFACIS

SEQ ID NO: 22667 - protein, 11 aa, synthetic construct
SLMSTAIGGSL

SEQ ID NO: 22668 - protein, 9 aa, synthetic construct
SRAFLHALL

SEQ ID NO: 22669 - protein, 9 aa, synthetic construct
LQRAWGALI

SEQ ID NO: 22670 - protein, 9 aa, synthetic construct
RLPSKTPSI

SEQ ID NO: 22671 - protein, 9 aa, synthetic construct
SRPLPNKLN

SEQ ID NO: 22672 - protein, 8 aa, synthetic construct
SPRIPNVF

SEQ ID NO: 22673 - protein, 9 aa, synthetic construct
QAILQLGGF

SEQ ID NO: 22674 - protein, 11 aa, synthetic construct
GNAIGGKATFL

SEQ ID NO: 22675 - protein, 12 aa, synthetic construct
ERDAAVKFLAGL

SEQ ID NO: 22676 - protein, 10 aa, synthetic construct
QQQLGAGEAL

SEQ ID NO: 22677 - protein, 8 aa, synthetic construct
THCRKEAL

SEQ ID NO: 22678 - protein, 10 aa, synthetic construct
VHFTIQSCEL

SEQ ID NO: 22679 - protein, 10 aa, synthetic construct
LPHGDQQYLF

SEQ ID NO: 22680 - protein, 10 aa, synthetic construct
LHIMAVILGI

SEQ ID NO: 22681 - protein, 8 aa, synthetic construct
KPDKHEGF

SEQ ID NO: 22682 - protein, 9 aa, synthetic construct
SRPPPAEGF

SEQ ID NO: 22683 - protein, 9 aa, synthetic construct
KSHVPVLSV

SEQ ID NO: 22684 - protein, 8 aa, synthetic construct
YFTKITDF

SEQ ID NO: 22685 - protein, 9 aa, synthetic construct
RTVQPFSAL

SEQ ID NO: 22686 - protein, 9 aa, synthetic construct
SPVGRTLRV

SEQ ID NO: 22687 - protein, 10 aa, synthetic construct
SDKQNGLKVI

SEQ ID NO: 22688 - protein, 9 aa, synthetic construct
RPRMNANSL

SEQ ID NO: 22689 - protein, 10 aa, synthetic construct
KNWQGLQQVL

SEQ ID NO: 22690 - protein, 9 aa, synthetic construct
PRSSTLTVV

SEQ ID NO: 22691 - protein, 8 aa, synthetic construct
STRPSPVL

SEQ ID NO: 22692 - protein, 9 aa, synthetic construct
VNLHEAILL

SEQ ID NO: 22693 - protein, 10 aa, synthetic construct
FPRNISAGSL

SEQ ID NO: 22694 - protein, 9 aa, synthetic construct
LAPTRSTSL

SEQ ID NO: 22695 - protein, 7 aa, synthetic construct
QNRQNLM

SEQ ID NO: 22696 - protein, 9 aa, synthetic construct
VNQFFKTML

SEQ ID NO: 22697 - protein, 10 aa, synthetic construct
FGVLFEATMI

SEQ ID NO: 22698 - protein, 11 aa, synthetic construct
SPSAERRGLNL

SEQ ID NO: 22699 - protein, 9 aa, synthetic construct
SPSASALLT

SEQ ID NO: 22700 - protein, 8 aa, synthetic construct
SNELASLI

SEQ ID NO: 22701 - protein, 8 aa, synthetic construct
QDISLAAL

SEQ ID NO: 22702 - protein, 9 aa, synthetic construct
TMSSVVLEL

SEQ ID NO: 22703 - protein, 8 aa, synthetic construct
IEEQDIVM

SEQ ID NO: 22704 - protein, 9 aa, synthetic construct
SPSPRISDI

SEQ ID NO: 22705 - protein, 10 aa, synthetic construct
SPLAAQNASL

SEQ ID NO: 22706 - protein, 9 aa, synthetic construct
SPSDFSVSL

SEQ ID NO: 22707 - protein, 9 aa, synthetic construct
GDALEFLGY

SEQ ID NO: 22708 - protein, 9 aa, synthetic construct
SEPSSTVSL

SEQ ID NO: 22709 - protein, 11 aa, synthetic construct
YGYGSGFGSYG

SEQ ID NO: 22710 - protein, 9 aa, synthetic construct
LSMSRPLSP

SEQ ID NO: 22711 - protein, 10 aa, synthetic construct
VSPKEKQLEY

SEQ ID NO: 22712 - protein, 9 aa, synthetic construct
PSALQPNVF

SEQ ID NO: 22713 - protein, 9 aa, synthetic construct
GQEAGGVSI

SEQ ID NO: 22714 - protein, 9 aa, synthetic construct
NLPSSLLDF

SEQ ID NO: 22715 - protein, 9 aa, synthetic construct
SCALRRLFL

SEQ ID NO: 22716 - protein, 9 aa, synthetic construct
PLSMRYLFI

SEQ ID NO: 22717 - protein, 10 aa, synthetic construct
SPVAPSAASF

SEQ ID NO: 22718 - protein, 9 aa, synthetic construct
SPSPVPGTV

SEQ ID NO: 22719 - protein, 8 aa, synthetic construct
SPSPQTTV

SEQ ID NO: 22720 - protein, 10 aa, synthetic construct
SPSVLRPIVL

SEQ ID NO: 22721 - protein, 9 aa, synthetic construct
SLSPSSLTL

SEQ ID NO: 22722 - protein, 10 aa, synthetic construct
SPAAVPPEKL

SEQ ID NO: 22723 - protein, 8 aa, synthetic construct
ITEQFESL

SEQ ID NO: 22724 - protein, 8 aa, synthetic construct
SSPSAQEL

SEQ ID NO: 22725 - protein, 10 aa, synthetic construct
PSSSVQGTGL

SEQ ID NO: 22726 - protein, 10 aa, synthetic construct
GLETGSAGQL

SEQ ID NO: 22727 - protein, 10 aa, synthetic construct
LDSGKVAPPS

SEQ ID NO: 22728 - protein, 10 aa, synthetic construct
EASKVSPSVL

SEQ ID NO: 22729 - protein, 8 aa, synthetic construct
IQELVSAY

SEQ ID NO: 22730 - protein, 9 aa, synthetic construct
SPSYDKDKS

SEQ ID NO: 22731 - protein, 9 aa, synthetic construct
TPMLNSLIY

SEQ ID NO: 22732 - protein, 9 aa, synthetic construct
VSETPHPSF

SEQ ID NO: 22733 - protein, 9 aa, synthetic construct
TFSDQSPTL

SEQ ID NO: 22734 - protein, 9 aa, synthetic construct
SPSLRSMNF

SEQ ID NO: 22735 - protein, 10 aa, synthetic construct
SPVERGVVSI

SEQ ID NO: 22736 - protein, 10 aa, synthetic construct
SPLLPRSQTL

SEQ ID NO: 22737 - protein, 9 aa, synthetic construct
AGTPSPIQL

SEQ ID NO: 22738 - protein, 11 aa, synthetic construct
SAGPLPGNLQL

SEQ ID NO: 22739 - protein, 8 aa, synthetic construct
TELQIPSF

SEQ ID NO: 22740 - protein, 9 aa, synthetic construct
SPTQEKRML

SEQ ID NO: 22741 - protein, 9 aa, synthetic construct
SFIAGETVI

SEQ ID NO: 22742 - protein, 9 aa, synthetic construct
VTEGLLNTY

SEQ ID NO: 22743 - protein, 9 aa, synthetic construct
LTGDAYLAL

SEQ ID NO: 22744 - protein, 9 aa, synthetic construct
QSSLSPSSL

SEQ ID NO: 22745 - protein, 9 aa, synthetic construct
GLPTESLFY

SEQ ID NO: 22746 - protein, 8 aa, synthetic construct
LSNHFLFY

SEQ ID NO: 22747 - protein, 8 aa, synthetic construct
SPVFTKVI

SEQ ID NO: 22748 - protein, 10 aa, synthetic construct
GLGKSCSPVY

SEQ ID NO: 22749 - protein, 9 aa, synthetic construct
KSTVNVLGF

SEQ ID NO: 22750 - protein, 10 aa, synthetic construct
VPSGMYAPVY

SEQ ID NO: 22751 - protein, 9 aa, synthetic construct
SPPRYLLSY

SEQ ID NO: 22752 - protein, 8 aa, synthetic construct
SPKVLAQL

SEQ ID NO: 22753 - protein, 9 aa, synthetic construct
SPVLRRDMK

SEQ ID NO: 22754 - protein, 8 aa, synthetic construct
SPVLGERI

SEQ ID NO: 22755 - protein, 9 aa, synthetic construct
ISSPVLSLS

SEQ ID NO: 22756 - protein, 10 aa, synthetic construct
SPVVASGGKV

SEQ ID NO: 22757 - protein, 8 aa, synthetic construct
YQTRVYPS

SEQ ID NO: 22758 - protein, 9 aa, synthetic construct
DIKNVVLQY

SEQ ID NO: 22759 - protein, 9 aa, synthetic construct
SVTPEKIAY

SEQ ID NO: 22760 - protein, 10 aa, synthetic construct
GTGGKSIYRE

SEQ ID NO: 22761 - protein, 10 aa, synthetic construct
DILVVAQSVP

SEQ ID NO: 22762 - protein, 8 aa, synthetic construct
SPVVLGRV

SEQ ID NO: 22763 - protein, 8 aa, synthetic construct
PSVVRIGV

SEQ ID NO: 22764 - protein, 9 aa, synthetic construct
LFEGILAFY

SEQ ID NO: 22765 - protein, 11 aa, synthetic construct
GGEASAAMPAL

SEQ ID NO: 22766 - protein, 10 aa, synthetic construct
QGPSFAFYVP

SEQ ID NO: 22767 - protein, 9 aa, synthetic construct
ISPWLLRVE

SEQ ID NO: 22768 - protein, 9 aa, synthetic construct
LPCSGLAML

SEQ ID NO: 22769 - protein, 11 aa, synthetic construct
SPFSMKLMGSL

SEQ ID NO: 22770 - protein, 10 aa, synthetic construct
AMLASQTEAF

SEQ ID NO: 22771 - protein, 9 aa, synthetic construct
ASPYAGAGF

SEQ ID NO: 22772 - protein, 10 aa, synthetic construct
TPYDGVFIAL

SEQ ID NO: 22773 - protein, 9 aa, synthetic construct
SPSVQFRTL

SEQ ID NO: 22774 - protein, 8 aa, synthetic construct
LSSQEFVE

SEQ ID NO: 22775 - protein, 9 aa, synthetic construct
SMLLLRPTI

SEQ ID NO: 22776 - protein, 8 aa, synthetic construct
SMWWVIAY

SEQ ID NO: 22777 - protein, 9 aa, synthetic construct
MISDAIPEL

SEQ ID NO: 22778 - protein, 10 aa, synthetic construct
SPYLRPLEKI

SEQ ID NO: 22779 - protein, 9 aa, synthetic construct
VVSCSVGFF

SEQ ID NO: 22780 - protein, 10 aa, synthetic construct
MTVAGVQKLI

SEQ ID NO: 22781 - protein, 9 aa, synthetic construct
SPYSRSRYS

SEQ ID NO: 22782 - protein, 9 aa, synthetic construct
RETMVSVTM

SEQ ID NO: 22783 - protein, 9 aa, synthetic construct
NKDFDDSMF

SEQ ID NO: 22784 - protein, 9 aa, synthetic construct
IFDMDGLLL

SEQ ID NO: 22785 - protein, 9 aa, synthetic construct
SPMSEQSLI

SEQ ID NO: 22786 - protein, 10 aa, synthetic construct
PMSGPLSVSI

SEQ ID NO: 22787 - protein, 9 aa, synthetic construct
PSMHTSRLR

SEQ ID NO: 22788 - protein, 11 aa, synthetic construct
SPTAMEQPVFL

SEQ ID NO: 22789 - protein, 11 aa, synthetic construct
SMKAEDAQRVF

SEQ ID NO: 22790 - protein, 8 aa, synthetic construct
LQGTLLKI

SEQ ID NO: 22791 - protein, 9 aa, synthetic construct
TNCKFQLAK

SEQ ID NO: 22792 - protein, 9 aa, synthetic construct
SAGFASFDL

SEQ ID NO: 22793 - protein, 10 aa, synthetic construct
SAGFASFDLV

SEQ ID NO: 22794 - protein, 9 aa, synthetic construct
AFSQEVFKV

SEQ ID NO: 22795 - protein, 9 aa, synthetic construct
QIFNGTFVK

SEQ ID NO: 22796 - protein, 9 aa, synthetic construct
EIFNGTFVK

SEQ ID NO: 22797 - protein, 8 aa, synthetic construct
VEMKEKFK

SEQ ID NO: 22798 - protein, 8 aa, synthetic construct
FSQFLLTS

SEQ ID NO: 22799 - protein, 11 aa, synthetic construct
GTGFGGGSSFG

SEQ ID NO: 22800 - protein, 12 aa, synthetic construct
GSAPGGRAALLV

SEQ ID NO: 22801 - protein, 10 aa, synthetic construct
SQEKASCSAL

SEQ ID NO: 22802 - protein, 9 aa, synthetic construct
FAASISQCV

SEQ ID NO: 22803 - protein, 9 aa, synthetic construct
GSAFSQSGR

SEQ ID NO: 22804 - protein, 10 aa, synthetic construct
KMDMTSPEQS

SEQ ID NO: 22805 - protein, 10 aa, synthetic construct
SQLAAMIKAL

SEQ ID NO: 22806 - protein, 9 aa, synthetic construct
SQLASVPKI

SEQ ID NO: 22807 - protein, 9 aa, synthetic construct
SGALRAFVK

SEQ ID NO: 22808 - protein, 10 aa, synthetic construct
IDSIHQLVVG

SEQ ID NO: 22809 - protein, 11 aa, synthetic construct
ESGALHVVIVG

SEQ ID NO: 22810 - protein, 12 aa, synthetic construct
ESGALHVVIVGG

SEQ ID NO: 22811 - protein, 9 aa, synthetic construct
TNLLFQSCP

SEQ ID NO: 22812 - protein, 8 aa, synthetic construct
LLQSVNQL

SEQ ID NO: 22813 - protein, 8 aa, synthetic construct
QSIPKISI

SEQ ID NO: 22814 - protein, 8 aa, synthetic construct
NTLHYIHI

SEQ ID NO: 22815 - protein, 9 aa, synthetic construct
QSKGTILFF

SEQ ID NO: 22816 - protein, 10 aa, synthetic construct
AKDKGPEPTF

SEQ ID NO: 22817 - protein, 8 aa, synthetic construct
LSQAIVKV

SEQ ID NO: 22818 - protein, 11 aa, synthetic construct
AGSLLHLAGIR

SEQ ID NO: 22819 - protein, 8 aa, synthetic construct
LQSLIHIL

SEQ ID NO: 22820 - protein, 8 aa, synthetic construct
SQLLQLKL

SEQ ID NO: 22821 - protein, 8 aa, synthetic construct
VTQSLQLL

SEQ ID NO: 22822 - protein, 8 aa, synthetic construct
SQLQLVCR

SEQ ID NO: 22823 - protein, 9 aa, synthetic construct
AVASGIRKV

SEQ ID NO: 22824 - protein, 8 aa, synthetic construct
QSLKLLKS

SEQ ID NO: 22825 - protein, 8 aa, synthetic construct
QSLVLDTL

SEQ ID NO: 22826 - protein, 8 aa, synthetic construct
QSMTDMLL

SEQ ID NO: 22827 - protein, 10 aa, synthetic construct
SGAKQTGETL

SEQ ID NO: 22828 - protein, 10 aa, synthetic construct
TVGGMLLSVL

SEQ ID NO: 22829 - protein, 10 aa, synthetic construct
SAGGHPIVQL

SEQ ID NO: 22830 - protein, 9 aa, synthetic construct
SSGALIPAI

SEQ ID NO: 22831 - protein, 9 aa, synthetic construct
LAGTSLSVL

SEQ ID NO: 22832 - protein, 8 aa, synthetic construct
VNTLFQAT

SEQ ID NO: 22833 - protein, 9 aa, synthetic construct
SWSQAPLTL

SEQ ID NO: 22834 - protein, 8 aa, synthetic construct
FTNYVLLL

SEQ ID NO: 22835 - protein, 9 aa, synthetic construct
VLEYGSQQV

SEQ ID NO: 22836 - protein, 9 aa, synthetic construct
NTYSGVVKI

SEQ ID NO: 22837 - protein, 9 aa, synthetic construct
HNYTGTVQS

SEQ ID NO: 22838 - protein, 9 aa, synthetic construct
NTYKLKSQI

SEQ ID NO: 22839 - protein, 8 aa, synthetic construct
SQWEICLS

SEQ ID NO: 22840 - protein, 8 aa, synthetic construct
SQYANIVN

SEQ ID NO: 22841 - protein, 8 aa, synthetic construct
SQYLLQMK

SEQ ID NO: 22842 - protein, 9 aa, synthetic construct
VINSANYVY

SEQ ID NO: 22843 - protein, 10 aa, synthetic construct
FGQSVGSVVY

SEQ ID NO: 22844 - protein, 8 aa, synthetic construct
QSYQKEGL

SEQ ID NO: 22845 - protein, 9 aa, synthetic construct
GSSFVSLLL

SEQ ID NO: 22846 - protein, 9 aa, synthetic construct
KSMDIVLTV

SEQ ID NO: 22847 - protein, 11 aa, synthetic construct
SATMGQLYEVM

SEQ ID NO: 22848 - protein, 9 aa, synthetic construct
TNRIQFGPV

SEQ ID NO: 22849 - protein, 10 aa, synthetic construct
LTGRGQRTLW

SEQ ID NO: 22850 - protein, 10 aa, synthetic construct
PSRQLLHPSL

SEQ ID NO: 22851 - protein, 10 aa, synthetic construct
QRPSLQKPPP

SEQ ID NO: 22852 - protein, 11 aa, synthetic construct
GPEGKLKGSKF

SEQ ID NO: 22853 - protein, 9 aa, synthetic construct
VWPLAPAVF

SEQ ID NO: 22854 - protein, 8 aa, synthetic construct
FLIHLFQF

SEQ ID NO: 22855 - protein, 9 aa, synthetic construct
MTAIQLIQF

SEQ ID NO: 22856 - protein, 8 aa, synthetic construct
KGHRHAKF

SEQ ID NO: 22857 - protein, 13 aa, synthetic construct
AASSNTDMTYGGL

SEQ ID NO: 22858 - protein, 12 aa, synthetic construct
CQSCVHQASNII

SEQ ID NO: 22859 - protein, 11 aa, synthetic construct
YRMGENFCNLL

SEQ ID NO: 22860 - protein, 11 aa, synthetic construct
AGGCGRGCSFL

SEQ ID NO: 22861 - protein, 10 aa, synthetic construct
MDQGATDFQI

SEQ ID NO: 22862 - protein, 9 aa, synthetic construct
VRTMSALWN

SEQ ID NO: 22863 - protein, 10 aa, synthetic construct
RAVPGHLQKL

SEQ ID NO: 22864 - protein, 10 aa, synthetic construct
LINPGNHLKI

SEQ ID NO: 22865 - protein, 11 aa, synthetic construct
SPAQPLHSLSF

SEQ ID NO: 22866 - protein, 10 aa, synthetic construct
ADKAPFFFSF

SEQ ID NO: 22867 - protein, 9 aa, synthetic construct
KSFRGFIRL

SEQ ID NO: 22868 - protein, 8 aa, synthetic construct
CSKRTFHL

SEQ ID NO: 22869 - protein, 10 aa, synthetic construct
GPLHVLQVAM

SEQ ID NO: 22870 - protein, 12 aa, synthetic construct
ITVHTPRRGLID

SEQ ID NO: 22871 - protein, 11 aa, synthetic construct
FRLLQTANRSK

SEQ ID NO: 22872 - protein, 13 aa, synthetic construct
PKKSKTSGASKTK

SEQ ID NO: 22873 - protein, 9 aa, synthetic construct
MREALALRL

SEQ ID NO: 22874 - protein, 10 aa, synthetic construct
GKGPLSYVKE

SEQ ID NO: 22875 - protein, 11 aa, synthetic construct
SHSTASRSNSL

SEQ ID NO: 22876 - protein, 9 aa, synthetic construct
NTSMKVIYL

SEQ ID NO: 22877 - protein, 12 aa, synthetic construct
KHLLSNEVSVDF

SEQ ID NO: 22878 - protein, 9 aa, synthetic construct
TGHLSGWGA

SEQ ID NO: 22879 - protein, 9 aa, synthetic construct
RVAQCLTSL

SEQ ID NO: 22880 - protein, 10 aa, synthetic construct
LGLEDVGTTP

SEQ ID NO: 22881 - protein, 12 aa, synthetic construct
GVLSCHGGSFTI

SEQ ID NO: 22882 - protein, 9 aa, synthetic construct
ISGRTMVEY

SEQ ID NO: 22883 - protein, 10 aa, synthetic construct
PAFVYVVAVF

SEQ ID NO: 22884 - protein, 9 aa, synthetic construct
LLVFKEAFH

SEQ ID NO: 22885 - protein, 9 aa, synthetic construct
EVGKHLAHI

SEQ ID NO: 22886 - protein, 10 aa, synthetic construct
LGLVSGLRTL

SEQ ID NO: 22887 - protein, 10 aa, synthetic construct
QRAKEILTRG

SEQ ID NO: 22888 - protein, 12 aa, synthetic construct
IIFQGPISAAGK

SEQ ID NO: 22889 - protein, 10 aa, synthetic construct
IVEALQLPNF

SEQ ID NO: 22890 - protein, 9 aa, synthetic construct
RVTAERNLF

SEQ ID NO: 22891 - protein, 8 aa, synthetic construct
LLIWKTEL

SEQ ID NO: 22892 - protein, 10 aa, synthetic construct
SHSPPLTVEH

SEQ ID NO: 22893 - protein, 12 aa, synthetic construct
YGAFGLPITVAH

SEQ ID NO: 22894 - protein, 9 aa, synthetic construct
VSQREELKL

SEQ ID NO: 22895 - protein, 9 aa, synthetic construct
SRLLLRGFF

SEQ ID NO: 22896 - protein, 9 aa, synthetic construct
KPHTPLIRF

SEQ ID NO: 22897 - protein, 9 aa, synthetic construct
QRSHLKLEY

SEQ ID NO: 22898 - protein, 10 aa, synthetic construct
SICAAVLSKF

SEQ ID NO: 22899 - protein, 10 aa, synthetic construct
RSLFVRLVPC

SEQ ID NO: 22900 - protein, 9 aa, synthetic construct
SRVGLSFPF

SEQ ID NO: 22901 - protein, 10 aa, synthetic construct
HLSRVFIFVP

SEQ ID NO: 22902 - protein, 9 aa, synthetic construct
PARTVIFSY

SEQ ID NO: 22903 - protein, 9 aa, synthetic construct
RRRRSAATF

SEQ ID NO: 22904 - protein, 9 aa, synthetic construct
FIHSRLKTK

SEQ ID NO: 22905 - protein, 11 aa, synthetic construct
RGVLKISGLTY

SEQ ID NO: 22906 - protein, 10 aa, synthetic construct
LYNSAVVTMP

SEQ ID NO: 22907 - protein, 11 aa, synthetic construct
MPPEKVHKELF

SEQ ID NO: 22908 - protein, 9 aa, synthetic construct
PCRRLPIFM

SEQ ID NO: 22909 - protein, 9 aa, synthetic construct
STRVPLQGF

SEQ ID NO: 22910 - protein, 10 aa, synthetic construct
SRALTPSPVM

SEQ ID NO: 22911 - protein, 11 aa, synthetic construct
LLCLPLQLRPL

SEQ ID NO: 22912 - protein, 10 aa, synthetic construct
YALETRLAGI

SEQ ID NO: 22913 - protein, 11 aa, synthetic construct
TSTGIIGVKTF

SEQ ID NO: 22914 - protein, 11 aa, synthetic construct
CTSPTKMDLSY

SEQ ID NO: 22915 - protein, 10 aa, synthetic construct
FLEQLRKNFG

SEQ ID NO: 22916 - protein, 9 aa, synthetic construct
QMYDKGLVY

SEQ ID NO: 22917 - protein, 10 aa, synthetic construct
QATETQPIVY

SEQ ID NO: 22918 - protein, 11 aa, synthetic construct
VKGRSTNDVFK

SEQ ID NO: 22919 - protein, 9 aa, synthetic construct
TTIDNLCSI

SEQ ID NO: 22920 - protein, 9 aa, synthetic construct
RSEPVLLFL

SEQ ID NO: 22921 - protein, 9 aa, synthetic construct
SPLDRLPLV

SEQ ID NO: 22922 - protein, 9 aa, synthetic construct
PWNVASLIY

SEQ ID NO: 22923 - protein, 9 aa, synthetic construct
GKKCTEALY

SEQ ID NO: 22924 - protein, 10 aa, synthetic construct
VEEPIGLIEI

SEQ ID NO: 22925 - protein, 9 aa, synthetic construct
LSRPLLENK

SEQ ID NO: 22926 - protein, 10 aa, synthetic construct
LFVFGSGMLE

SEQ ID NO: 22927 - protein, 8 aa, synthetic construct
TCLVRRFT

SEQ ID NO: 22928 - protein, 11 aa, synthetic construct
SRSLAALAGVL

SEQ ID NO: 22929 - protein, 9 aa, synthetic construct
IRQTGVIVL

SEQ ID NO: 22930 - protein, 10 aa, synthetic construct
KTIREGVLAI

SEQ ID NO: 22931 - protein, 10 aa, synthetic construct
SRSLVIGEVL

SEQ ID NO: 22932 - protein, 9 aa, synthetic construct
LCSQPRVLN

SEQ ID NO: 22933 - protein, 11 aa, synthetic construct
KSRTGVMIPIP

SEQ ID NO: 22934 - protein, 11 aa, synthetic construct
LAEHLNASLAF

SEQ ID NO: 22935 - protein, 9 aa, synthetic construct
MLTEALPTF

SEQ ID NO: 22936 - protein, 10 aa, synthetic construct
NSSGSILPTF

SEQ ID NO: 22937 - protein, 10 aa, synthetic construct
ISPPPRGPSL

SEQ ID NO: 22938 - protein, 10 aa, synthetic construct
GSPPRLPSPL

SEQ ID NO: 22939 - protein, 10 aa, synthetic construct
PPSPRGLPSL

SEQ ID NO: 22940 - protein, 9 aa, synthetic construct
AKIKQKIEY

SEQ ID NO: 22941 - protein, 10 aa, synthetic construct
GMSFLRSVLS

SEQ ID NO: 22942 - protein, 9 aa, synthetic construct
QRATHLLVL

SEQ ID NO: 22943 - protein, 10 aa, synthetic construct
LPMVLKVPRL

SEQ ID NO: 22944 - protein, 9 aa, synthetic construct
LLCISLPVF

SEQ ID NO: 22945 - protein, 10 aa, synthetic construct
AKAGTRLQAF

SEQ ID NO: 22946 - protein, 9 aa, synthetic construct
PFALRCPAF

SEQ ID NO: 22947 - protein, 9 aa, synthetic construct
KYGRGENIY

SEQ ID NO: 22948 - protein, 8 aa, synthetic construct
NYRKENLY

SEQ ID NO: 22949 - protein, 12 aa, synthetic construct
SLNGTQMFADSY

SEQ ID NO: 22950 - protein, 11 aa, synthetic construct
SSCARAARAPS

SEQ ID NO: 22951 - protein, 8 aa, synthetic construct
ASEDSVLL

SEQ ID NO: 22952 - protein, 9 aa, synthetic construct
LARNMELTY

SEQ ID NO: 22953 - protein, 8 aa, synthetic construct
QKMEDVYQ

SEQ ID NO: 22954 - protein, 9 aa, synthetic construct
LGCMWVFGS

SEQ ID NO: 22955 - protein, 10 aa, synthetic construct
VMVNSTDPHG

SEQ ID NO: 22956 - protein, 9 aa, synthetic construct
SSDPNELYV

SEQ ID NO: 22957 - protein, 8 aa, synthetic construct
NGNIDLMY

SEQ ID NO: 22958 - protein, 12 aa, synthetic construct
SSPGRGGSSEPG

SEQ ID NO: 22959 - protein, 9 aa, synthetic construct
CIEVPVDQD

SEQ ID NO: 22960 - protein, 10 aa, synthetic construct
QDAEVLSGEP

SEQ ID NO: 22961 - protein, 10 aa, synthetic construct
QTDIPPDVDT

SEQ ID NO: 22962 - protein, 9 aa, synthetic construct
SLSSTELYY

SEQ ID NO: 22963 - protein, 9 aa, synthetic construct
TLYETLASY

SEQ ID NO: 22964 - protein, 9 aa, synthetic construct
INSKFMGTY

SEQ ID NO: 22965 - protein, 10 aa, synthetic construct
TQDMFSPDQS

SEQ ID NO: 22966 - protein, 8 aa, synthetic construct
YTNDILAM

SEQ ID NO: 22967 - protein, 9 aa, synthetic construct
EGIQYLSDY

SEQ ID NO: 22968 - protein, 10 aa, synthetic construct
SYDAGIAMYP

SEQ ID NO: 22969 - protein, 9 aa, synthetic construct
VGVIDFSLY

SEQ ID NO: 22970 - protein, 8 aa, synthetic construct
MMLRSVLY

SEQ ID NO: 22971 - protein, 9 aa, synthetic construct
LPVFSSLSL

SEQ ID NO: 22972 - protein, 9 aa, synthetic construct
ALQFLKTSS

SEQ ID NO: 22973 - protein, 9 aa, synthetic construct
SSFRLTGKV

SEQ ID NO: 22974 - protein, 8 aa, synthetic construct
SGLYFSSL

SEQ ID NO: 22975 - protein, 11 aa, synthetic construct
SSGFGQHVSGS

SEQ ID NO: 22976 - protein, 9 aa, synthetic construct
GSSGAYNSF

SEQ ID NO: 22977 - protein, 10 aa, synthetic construct
SSGFSGGSGF

SEQ ID NO: 22978 - protein, 10 aa, synthetic construct
SSPSSLSMAS

SEQ ID NO: 22979 - protein, 10 aa, synthetic construct
CPPATEGREG

SEQ ID NO: 22980 - protein, 13 aa, synthetic construct
SSHKAHQVVKKAS

SEQ ID NO: 22981 - protein, 8 aa, synthetic construct
WSSSLPLA

SEQ ID NO: 22982 - protein, 7 aa, synthetic construct
SSKELWF

SEQ ID NO: 22983 - protein, 8 aa, synthetic construct
NYSPVIGF

SEQ ID NO: 22984 - protein, 8 aa, synthetic construct
DALLFGNF

SEQ ID NO: 22985 - protein, 9 aa, synthetic construct
SSITDLGGF

SEQ ID NO: 22986 - protein, 8 aa, synthetic construct
NSMGKRGF

SEQ ID NO: 22987 - protein, 9 aa, synthetic construct
SSILGSLGL

SEQ ID NO: 22988 - protein, 9 aa, synthetic construct
SSLEKLGLD

SEQ ID NO: 22989 - protein, 9 aa, synthetic construct
SSILQSLVD

SEQ ID NO: 22990 - protein, 9 aa, synthetic construct
SSILELDGK

SEQ ID NO: 22991 - protein, 9 aa, synthetic construct
SSLLENVEK

SEQ ID NO: 22992 - protein, 11 aa, synthetic construct
SSLLAPSSGLS

SEQ ID NO: 22993 - protein, 11 aa, synthetic construct
SSLLEGAQTAI

SEQ ID NO: 22994 - protein, 9 aa, synthetic construct
SSLPIKKIA

SEQ ID NO: 22995 - protein, 9 aa, synthetic construct
SSLPYIIVE

SEQ ID NO: 22996 - protein, 10 aa, synthetic construct
PATGIKLFSS

SEQ ID NO: 22997 - protein, 11 aa, synthetic construct
SSLALTSASRI

SEQ ID NO: 22998 - protein, 9 aa, synthetic construct
LVRTFSSMV

SEQ ID NO: 22999 - protein, 9 aa, synthetic construct
SSLLKKYLL

SEQ ID NO: 23000 - protein, 10 aa, synthetic construct
SSPFPAPHLT

SEQ ID NO: 23001 - protein, 8 aa, synthetic construct
FLAEQGAF

SEQ ID NO: 23002 - protein, 8 aa, synthetic construct
SSVPSLEL

SEQ ID NO: 23003 - protein, 9 aa, synthetic construct
SSADVPLLG

SEQ ID NO: 23004 - protein, 9 aa, synthetic construct
SSPNPSDIR

SEQ ID NO: 23005 - protein, 9 aa, synthetic construct
SISMSLAML

SEQ ID NO: 23006 - protein, 10 aa, synthetic construct
KSARDSLPLL

SEQ ID NO: 23007 - protein, 10 aa, synthetic construct
SESGVQLSGS

SEQ ID NO: 23008 - protein, 11 aa, synthetic construct
ESSLGLSNGVS

SEQ ID NO: 23009 - protein, 12 aa, synthetic construct
SSEGLAQGSTLA

SEQ ID NO: 23010 - protein, 9 aa, synthetic construct
FDSVVVNGF

SEQ ID NO: 23011 - protein, 9 aa, synthetic construct
FGDTLGVFQ

SEQ ID NO: 23012 - protein, 9 aa, synthetic construct
KKSDTSGNF

SEQ ID NO: 23013 - protein, 10 aa, synthetic construct
APSTIFSGGF

SEQ ID NO: 23014 - protein, 10 aa, synthetic construct
GGTGQGRFGF

SEQ ID NO: 23015 - protein, 11 aa, synthetic construct
SAYVLASLAGE

SEQ ID NO: 23016 - protein, 8 aa, synthetic construct
TSSPLPLT

SEQ ID NO: 23017 - protein, 10 aa, synthetic construct
VIFVLESVFK

SEQ ID NO: 23018 - protein, 11 aa, synthetic construct
VPVPVPSEKTK

SEQ ID NO: 23019 - protein, 11 aa, synthetic construct
SSEGRDIPPAS

SEQ ID NO: 23020 - protein, 14 aa, synthetic construct
SSGASPGALGSGAP

SEQ ID NO: 23021 - protein, 11 aa, synthetic construct
SSVPADSHTSK

SEQ ID NO: 23022 - protein, 11 aa, synthetic construct
FAPPVSEPSGQ

SEQ ID NO: 23023 - protein, 8 aa, synthetic construct
LSYSLVSQ

SEQ ID NO: 23024 - protein, 7 aa, synthetic construct
NYITAII

SEQ ID NO: 23025 - protein, 10 aa, synthetic construct
QALQDASAAC

SEQ ID NO: 23026 - protein, 8 aa, synthetic construct
SSVQMPVI

SEQ ID NO: 23027 - protein, 9 aa, synthetic construct
SLHLLHHLF

SEQ ID NO: 23028 - protein, 9 aa, synthetic construct
STCELIQYV

SEQ ID NO: 23029 - protein, 9 aa, synthetic construct
ISESHPILY

SEQ ID NO: 23030 - protein, 10 aa, synthetic construct
MKAMYPGTFY

SEQ ID NO: 23031 - protein, 10 aa, synthetic construct
EYKGETKSFY

SEQ ID NO: 23032 - protein, 9 aa, synthetic construct
NMTAQNYTY

SEQ ID NO: 23033 - protein, 11 aa, synthetic construct
PPLSAPLDDAA

SEQ ID NO: 23034 - protein, 10 aa, synthetic construct
TDSSSLRLST

SEQ ID NO: 23035 - protein, 9 aa, synthetic construct
ESSPKKEVY

SEQ ID NO: 23036 - protein, 9 aa, synthetic construct
STPGRYYNY

SEQ ID NO: 23037 - protein, 9 aa, synthetic construct
STFETQSLK

SEQ ID NO: 23038 - protein, 10 aa, synthetic construct
TSPKPRKSMV

SEQ ID NO: 23039 - protein, 9 aa, synthetic construct
RLTRKSSTS

SEQ ID NO: 23040 - protein, 9 aa, synthetic construct
STEPFTIKL

SEQ ID NO: 23041 - protein, 9 aa, synthetic construct
STFQLYLKS

SEQ ID NO: 23042 - protein, 8 aa, synthetic construct
SSDGLNVE

SEQ ID NO: 23043 - protein, 8 aa, synthetic construct
LDGSSNVE

SEQ ID NO: 23044 - protein, 8 aa, synthetic construct
SEGVSNVE

SEQ ID NO: 23045 - protein, 11 aa, synthetic construct
NAETASVSDMG

SEQ ID NO: 23046 - protein, 10 aa, synthetic construct
STLEPVMAIY

SEQ ID NO: 23047 - protein, 11 aa, synthetic construct
GHIDCGSLLGY

SEQ ID NO: 23048 - protein, 10 aa, synthetic construct
STIETGLMLK

SEQ ID NO: 23049 - protein, 11 aa, synthetic construct
QGLACGALSLY

SEQ ID NO: 23050 - protein, 8 aa, synthetic construct
SITHLVIR

SEQ ID NO: 23051 - protein, 9 aa, synthetic construct
LETLLGDAF

SEQ ID NO: 23052 - protein, 9 aa, synthetic construct
ETLLEAARF

SEQ ID NO: 23053 - protein, 8 aa, synthetic construct
IYDNQYLY

SEQ ID NO: 23054 - protein, 8 aa, synthetic construct
SEPVATAL

SEQ ID NO: 23055 - protein, 8 aa, synthetic construct
TSAVMQAL

SEQ ID NO: 23056 - protein, 9 aa, synthetic construct
PQLGDLLAK

SEQ ID NO: 23057 - protein, 9 aa, synthetic construct
STEPCLSGL

SEQ ID NO: 23058 - protein, 8 aa, synthetic construct
STFQLEEL

SEQ ID NO: 23059 - protein, 9 aa, synthetic construct
STILKIQSR

SEQ ID NO: 23060 - protein, 10 aa, synthetic construct
YTAVLRGQST

SEQ ID NO: 23061 - protein, 12 aa, synthetic construct
STVGQAPSAAAQ

SEQ ID NO: 23062 - protein, 8 aa, synthetic construct
SSSEISVK

SEQ ID NO: 23063 - protein, 8 aa, synthetic construct
SDVTTSVK

SEQ ID NO: 23064 - protein, 9 aa, synthetic construct
TSYYSLRQY

SEQ ID NO: 23065 - protein, 11 aa, synthetic construct
SVGCKVSEKVT

SEQ ID NO: 23066 - protein, 9 aa, synthetic construct
TGDVIAINY

SEQ ID NO: 23067 - protein, 12 aa, synthetic construct
HVGSKCVSGAAP

SEQ ID NO: 23068 - protein, 10 aa, synthetic construct
SLGRLGLGVS

SEQ ID NO: 23069 - protein, 11 aa, synthetic construct
GVTGAAKVAKG

SEQ ID NO: 23070 - protein, 10 aa, synthetic construct
ALSWLPSAPA

SEQ ID NO: 23071 - protein, 10 aa, synthetic construct
SVSSGCGFAL

SEQ ID NO: 23072 - protein, 10 aa, synthetic construct
SVCGEVVLVK

SEQ ID NO: 23073 - protein, 8 aa, synthetic construct
ERCGLEAF

SEQ ID NO: 23074 - protein, 9 aa, synthetic construct
LNLMEHVSY

SEQ ID NO: 23075 - protein, 10 aa, synthetic construct
KHDSASNISY

SEQ ID NO: 23076 - protein, 10 aa, synthetic construct
EATAADVEAY

SEQ ID NO: 23077 - protein, 10 aa, synthetic construct
DVSQAQAGTY

SEQ ID NO: 23078 - protein, 9 aa, synthetic construct
TDVVEGQEY

SEQ ID NO: 23079 - protein, 9 aa, synthetic construct
VISSDQIYY

SEQ ID NO: 23080 - protein, 10 aa, synthetic construct
LLGGIDSSYY

SEQ ID NO: 23081 - protein, 9 aa, synthetic construct
SSEVEVLYL

SEQ ID NO: 23082 - protein, 9 aa, synthetic construct
KDCAGVILY

SEQ ID NO: 23083 - protein, 10 aa, synthetic construct
VSETLSMLGQ

SEQ ID NO: 23084 - protein, 9 aa, synthetic construct
AKLTVIEPA

SEQ ID NO: 23085 - protein, 10 aa, synthetic construct
PPAGPPAFPA

SEQ ID NO: 23086 - protein, 8 aa, synthetic construct
SVFALHFT

SEQ ID NO: 23087 - protein, 9 aa, synthetic construct
GLGSFVVGV

SEQ ID NO: 23088 - protein, 9 aa, synthetic construct
SEDYQIILY

SEQ ID NO: 23089 - protein, 11 aa, synthetic construct
SLSSTTLPFPA

SEQ ID NO: 23090 - protein, 9 aa, synthetic construct
VSFTDNDVY

SEQ ID NO: 23091 - protein, 10 aa, synthetic construct
SVFSLSLFRA

SEQ ID NO: 23092 - protein, 9 aa, synthetic construct
SVFLATDRA

SEQ ID NO: 23093 - protein, 8 aa, synthetic construct
VWTFEKVS

SEQ ID NO: 23094 - protein, 10 aa, synthetic construct
VYAKKLWTAP

SEQ ID NO: 23095 - protein, 13 aa, synthetic construct
IIHGGKTPNNEVS

SEQ ID NO: 23096 - protein, 8 aa, synthetic construct
SVVGVRGL

SEQ ID NO: 23097 - protein, 10 aa, synthetic construct
AGPLWTHLAP

SEQ ID NO: 23098 - protein, 10 aa, synthetic construct
VSLAVTDTEK

SEQ ID NO: 23099 - protein, 10 aa, synthetic construct
SIVAHVDHGK

SEQ ID NO: 23100 - protein, 9 aa, synthetic construct
LEKTLEAYG

SEQ ID NO: 23101 - protein, 11 aa, synthetic construct
APSPALDLLPA

SEQ ID NO: 23102 - protein, 11 aa, synthetic construct
DVDSVSVLQAY

SEQ ID NO: 23103 - protein, 9 aa, synthetic construct
IPVSTTAHF

SEQ ID NO: 23104 - protein, 9 aa, synthetic construct
VSLEQQLRE

SEQ ID NO: 23105 - protein, 9 aa, synthetic construct
VSLEEIACQ

SEQ ID NO: 23106 - protein, 8 aa, synthetic construct
IEGKSSQF

SEQ ID NO: 23107 - protein, 9 aa, synthetic construct
GSLVGPQIY

SEQ ID NO: 23108 - protein, 11 aa, synthetic construct
VPPSRPGGPAL

SEQ ID NO: 23109 - protein, 9 aa, synthetic construct
IVSLKRLPA

SEQ ID NO: 23110 - protein, 9 aa, synthetic construct
SLVVKSWVS

SEQ ID NO: 23111 - protein, 9 aa, synthetic construct
SVSGLKQTL

SEQ ID NO: 23112 - protein, 9 aa, synthetic construct
SVEKKLMAF

SEQ ID NO: 23113 - protein, 9 aa, synthetic construct
VSLGGRQLL

SEQ ID NO: 23114 - protein, 11 aa, synthetic construct
VSVSVAPNAKI

SEQ ID NO: 23115 - protein, 8 aa, synthetic construct
LEHYYKVS

SEQ ID NO: 23116 - protein, 10 aa, synthetic construct
SLVSPQAKPA

SEQ ID NO: 23117 - protein, 9 aa, synthetic construct
LSVLDLVVA

SEQ ID NO: 23118 - protein, 12 aa, synthetic construct
LSPGTAASSLAP

SEQ ID NO: 23119 - protein, 10 aa, synthetic construct
VSLDPVSDFH

SEQ ID NO: 23120 - protein, 8 aa, synthetic construct
SVIEALKD

SEQ ID NO: 23121 - protein, 9 aa, synthetic construct
SVSLGLSSV

SEQ ID NO: 23122 - protein, 11 aa, synthetic construct
NILKQPPLLPA

SEQ ID NO: 23123 - protein, 9 aa, synthetic construct
VSLLKPTKV

SEQ ID NO: 23124 - protein, 10 aa, synthetic construct
VSISKLPKLK

SEQ ID NO: 23125 - protein, 9 aa, synthetic construct
IVLMQTVYY

SEQ ID NO: 23126 - protein, 9 aa, synthetic construct
RDRDTAPIW

SEQ ID NO: 23127 - protein, 9 aa, synthetic construct
SVLLWLPHL

SEQ ID NO: 23128 - protein, 10 aa, synthetic construct
KRSNCKPIPA

SEQ ID NO: 23129 - protein, 9 aa, synthetic construct
SVMELLQVK

SEQ ID NO: 23130 - protein, 10 aa, synthetic construct
SVGGSFYLQS

SEQ ID NO: 23131 - protein, 9 aa, synthetic construct
NSVGFILTS

SEQ ID NO: 23132 - protein, 10 aa, synthetic construct
PAQQVPKNPA

SEQ ID NO: 23133 - protein, 10 aa, synthetic construct
PQGAVPQSGV

SEQ ID NO: 23134 - protein, 11 aa, synthetic construct
SVLSGSQSGEL

SEQ ID NO: 23135 - protein, 11 aa, synthetic construct
PPTKTLFPEPA

SEQ ID NO: 23136 - protein, 9 aa, synthetic construct
VNEPLSFSV

SEQ ID NO: 23137 - protein, 9 aa, synthetic construct
YIPDYSVRA

SEQ ID NO: 23138 - protein, 9 aa, synthetic construct
VSFPAGVST

SEQ ID NO: 23139 - protein, 9 aa, synthetic construct
LRPDVLPAP

SEQ ID NO: 23140 - protein, 10 aa, synthetic construct
SVGAGTINAL

SEQ ID NO: 23141 - protein, 9 aa, synthetic construct
SVSAPVSLS

SEQ ID NO: 23142 - protein, 12 aa, synthetic construct
VSPSDYLQPAAS

SEQ ID NO: 23143 - protein, 9 aa, synthetic construct
VSTAPTQLT

SEQ ID NO: 23144 - protein, 8 aa, synthetic construct
LLNPDVSL

SEQ ID NO: 23145 - protein, 9 aa, synthetic construct
SVITSLPNI

SEQ ID NO: 23146 - protein, 9 aa, synthetic construct
VSSLTSVQN

SEQ ID NO: 23147 - protein, 9 aa, synthetic construct
VQSAFASSL

SEQ ID NO: 23148 - protein, 11 aa, synthetic construct
VSQEMIAPPAL

SEQ ID NO: 23149 - protein, 10 aa, synthetic construct
SVQGLHSPHS

SEQ ID NO: 23150 - protein, 11 aa, synthetic construct
GPPKALGLQAP

SEQ ID NO: 23151 - protein, 10 aa, synthetic construct
GGLGSQVSAL

SEQ ID NO: 23152 - protein, 10 aa, synthetic construct
EYAEKSYTHK

SEQ ID NO: 23153 - protein, 11 aa, synthetic construct
EVGMASIRDVY

SEQ ID NO: 23154 - protein, 12 aa, synthetic construct
EDSILEKTSAYS

SEQ ID NO: 23155 - protein, 10 aa, synthetic construct
LVSVSEVKAV

SEQ ID NO: 23156 - protein, 9 aa, synthetic construct
AETTVLEGY

SEQ ID NO: 23157 - protein, 10 aa, synthetic construct
SSRGYSTKAP

SEQ ID NO: 23158 - protein, 9 aa, synthetic construct
SVSLKNLIA

SEQ ID NO: 23159 - protein, 10 aa, synthetic construct
VSLIAGSATK

SEQ ID NO: 23160 - protein, 9 aa, synthetic construct
RLLEPPSPA

SEQ ID NO: 23161 - protein, 9 aa, synthetic construct
VATVTSILY

SEQ ID NO: 23162 - protein, 10 aa, synthetic construct
ESAEVLSASQ

SEQ ID NO: 23163 - protein, 10 aa, synthetic construct
ASLELAGQSY

SEQ ID NO: 23164 - protein, 10 aa, synthetic construct
VSVAGHVEVY

SEQ ID NO: 23165 - protein, 10 aa, synthetic construct
VSVQCLLGTP

SEQ ID NO: 23166 - protein, 8 aa, synthetic construct
QITALSSY

SEQ ID NO: 23167 - protein, 11 aa, synthetic construct
AVHQSEGGAVP

SEQ ID NO: 23168 - protein, 9 aa, synthetic construct
LTTGLSSEY

SEQ ID NO: 23169 - protein, 10 aa, synthetic construct
SVEGHSIGKT

SEQ ID NO: 23170 - protein, 10 aa, synthetic construct
LPKFYGELPA

SEQ ID NO: 23171 - protein, 11 aa, synthetic construct
SYVEPTAMKPA

SEQ ID NO: 23172 - protein, 12 aa, synthetic construct
SFPFQGLERTAP

SEQ ID NO: 23173 - protein, 9 aa, synthetic construct
VSYVRKVLQ

SEQ ID NO: 23174 - protein, 10 aa, synthetic construct
SVTNLPQVIK

SEQ ID NO: 23175 - protein, 11 aa, synthetic construct
SVMTSPCAKLS

SEQ ID NO: 23176 - protein, 9 aa, synthetic construct
YPSSLVYST

SEQ ID NO: 23177 - protein, 10 aa, synthetic construct
YQMSSEADDW

SEQ ID NO: 23178 - protein, 8 aa, synthetic construct
WDTEQLLI

SEQ ID NO: 23179 - protein, 9 aa, synthetic construct
FQAMSYDLL

SEQ ID NO: 23180 - protein, 9 aa, synthetic construct
YSAEQNKVV

SEQ ID NO: 23181 - protein, 9 aa, synthetic construct
WDSNVIETF

SEQ ID NO: 23182 - protein, 9 aa, synthetic construct
YSDIVGKIV

SEQ ID NO: 23183 - protein, 9 aa, synthetic construct
YSDLSSICR

SEQ ID NO: 23184 - protein, 10 aa, synthetic construct
ITDMISESKM

SEQ ID NO: 23185 - protein, 9 aa, synthetic construct
YVKISDSFW

SEQ ID NO: 23186 - protein, 9 aa, synthetic construct
SYESLFIRA

SEQ ID NO: 23187 - protein, 9 aa, synthetic construct
SYAYSGFVT

SEQ ID NO: 23188 - protein, 8 aa, synthetic construct
YSFHHRLF

SEQ ID NO: 23189 - protein, 9 aa, synthetic construct
YSGSGNGGF

SEQ ID NO: 23190 - protein, 10 aa, synthetic construct
SGYGGGSGFG

SEQ ID NO: 23191 - protein, 9 aa, synthetic construct
SGNSYGGGF

SEQ ID NO: 23192 - protein, 9 aa, synthetic construct
ALYSLTIPL

SEQ ID NO: 23193 - protein, 9 aa, synthetic construct
LSYIEHIFE

SEQ ID NO: 23194 - protein, 10 aa, synthetic construct
VSVAFPITML

SEQ ID NO: 23195 - protein, 10 aa, synthetic construct
SYLDIAKGAV

SEQ ID NO: 23196 - protein, 10 aa, synthetic construct
YSLLGGSNLL

SEQ ID NO: 23197 - protein, 9 aa, synthetic construct
YSLPSFLPL

SEQ ID NO: 23198 - protein, 9 aa, synthetic construct
YSILQTARL

SEQ ID NO: 23199 - protein, 11 aa, synthetic construct
YSLDVVNGLLF

SEQ ID NO: 23200 - protein, 11 aa, synthetic construct
SYLSVVVALGN

SEQ ID NO: 23201 - protein, 9 aa, synthetic construct
SYLEKLLLV

SEQ ID NO: 23202 - protein, 10 aa, synthetic construct
SPSLDNPTPF

SEQ ID NO: 23203 - protein, 10 aa, synthetic construct
LYSTAAPAVY

SEQ ID NO: 23204 - protein, 10 aa, synthetic construct
YSSRYALGLF

SEQ ID NO: 23205 - protein, 9 aa, synthetic construct
SYSTLTGSL

SEQ ID NO: 23206 - protein, 10 aa, synthetic construct
EAGSQDYSLL

SEQ ID NO: 23207 - protein, 11 aa, synthetic construct
SYGGKGHREDS

SEQ ID NO: 23208 - protein, 10 aa, synthetic construct
SYLLLTGGND

SEQ ID NO: 23209 - protein, 9 aa, synthetic construct
LTSMATSYF

SEQ ID NO: 23210 - protein, 9 aa, synthetic construct
LCSLTVFVF

SEQ ID NO: 23211 - protein, 9 aa, synthetic construct
VLAICIYSF

SEQ ID NO: 23212 - protein, 9 aa, synthetic construct
LRLKLSPSY

SEQ ID NO: 23213 - protein, 10 aa, synthetic construct
SPYFVYLGAY

SEQ ID NO: 23214 - protein, 11 aa, synthetic construct
YSISAAAIAIF

SEQ ID NO: 23215 - protein, 8 aa, synthetic construct
REFMELLF

SEQ ID NO: 23216 - protein, 10 aa, synthetic construct
TLQLREGHVM

SEQ ID NO: 23217 - protein, 11 aa, synthetic construct
PPDPAVGASSF

SEQ ID NO: 23218 - protein, 9 aa, synthetic construct
FPEMMSEVI

SEQ ID NO: 23219 - protein, 9 aa, synthetic construct
SMEDALLKL

SEQ ID NO: 23220 - protein, 8 aa, synthetic construct
MSSVPAVI

SEQ ID NO: 23221 - protein, 9 aa, synthetic construct
ASMVIAVPE

SEQ ID NO: 23222 - protein, 10 aa, synthetic construct
IMPGEMRNDL

SEQ ID NO: 23223 - protein, 10 aa, synthetic construct
SMDNNRSLDL

SEQ ID NO: 23224 - protein, 9 aa, synthetic construct
QTEAFVPIF

SEQ ID NO: 23225 - protein, 8 aa, synthetic construct
YAMEINPP

SEQ ID NO: 23226 - protein, 8 aa, synthetic construct
DEHQVATV

SEQ ID NO: 23227 - protein, 8 aa, synthetic construct
MSIRIESV

SEQ ID NO: 23228 - protein, 8 aa, synthetic construct
MSLPNVLI

SEQ ID NO: 23229 - protein, 9 aa, synthetic construct
LSMLPTVLI

SEQ ID NO: 23230 - protein, 8 aa, synthetic construct
SMTSPIQI

SEQ ID NO: 23231 - protein, 7 aa, synthetic construct
VCREPLV

SEQ ID NO: 23232 - protein, 9 aa, synthetic construct
MGSSPILVG

SEQ ID NO: 23233 - protein, 9 aa, synthetic construct
STEMTLMTL

SEQ ID NO: 23234 - protein, 11 aa, synthetic construct
MSTPAAGPAVL

SEQ ID NO: 23235 - protein, 8 aa, synthetic construct
FREDVMLL

SEQ ID NO: 23236 - protein, 9 aa, synthetic construct
LAMVSEMII

SEQ ID NO: 23237 - protein, 8 aa, synthetic construct
DSLMSLPL

SEQ ID NO: 23238 - protein, 10 aa, synthetic construct
SMYPGFSLTL

SEQ ID NO: 23239 - protein, 10 aa, synthetic construct
TPEACSGVMV

SEQ ID NO: 23240 - protein, 9 aa, synthetic construct
MGNYELISL

SEQ ID NO: 23241 - protein, 8 aa, synthetic construct
LVSQAPAF

SEQ ID NO: 23242 - protein, 8 aa, synthetic construct
ANVTTLSL

SEQ ID NO: 23243 - protein, 10 aa, synthetic construct
QRAGSPAAGP

SEQ ID NO: 23244 - protein, 10 aa, synthetic construct
VSGAGNVSGY

SEQ ID NO: 23245 - protein, 8 aa, synthetic construct
TAAAVQVF

SEQ ID NO: 23246 - protein, 9 aa, synthetic construct
AIATGGAVF

SEQ ID NO: 23247 - protein, 9 aa, synthetic construct
VVLSNGILY

SEQ ID NO: 23248 - protein, 10 aa, synthetic construct
SVAGDVSLFC

SEQ ID NO: 23249 - protein, 11 aa, synthetic construct
TAPAPKNGGKD

SEQ ID NO: 23250 - protein, 10 aa, synthetic construct
SVVNLADVIY

SEQ ID NO: 23251 - protein, 9 aa, synthetic construct
FTTGEAVLY

SEQ ID NO: 23252 - protein, 9 aa, synthetic construct
TAAVESILY

SEQ ID NO: 23253 - protein, 10 aa, synthetic construct
VVGSDVALRE

SEQ ID NO: 23254 - protein, 11 aa, synthetic construct
VLGAELSAVGE

SEQ ID NO: 23255 - protein, 10 aa, synthetic construct
VFDKEGNGTI

SEQ ID NO: 23256 - protein, 9 aa, synthetic construct
TAAGMPSWK

SEQ ID NO: 23257 - protein, 9 aa, synthetic construct
KDLIADLKY

SEQ ID NO: 23258 - protein, 10 aa, synthetic construct
TAAMAGLAFT

SEQ ID NO: 23259 - protein, 9 aa, synthetic construct
ATAQPPAPL

SEQ ID NO: 23260 - protein, 8 aa, synthetic construct
KDSPAPAL

SEQ ID NO: 23261 - protein, 13 aa, synthetic construct
TAAPPGLPPAAAG

SEQ ID NO: 23262 - protein, 9 aa, synthetic construct
ALAEGLGVI

SEQ ID NO: 23263 - protein, 9 aa, synthetic construct
AATPVPTIT

SEQ ID NO: 23264 - protein, 9 aa, synthetic construct
TVVPAAPEL

SEQ ID NO: 23265 - protein, 8 aa, synthetic construct
IIDKSDVF

SEQ ID NO: 23266 - protein, 9 aa, synthetic construct
AATDLGLAL

SEQ ID NO: 23267 - protein, 9 aa, synthetic construct
TAGRLTVTI

SEQ ID NO: 23268 - protein, 9 aa, synthetic construct
FGDVSIIIY

SEQ ID NO: 23269 - protein, 11 aa, synthetic construct
EEKAAAAVAPG

SEQ ID NO: 23270 - protein, 9 aa, synthetic construct
GERSTASTF

SEQ ID NO: 23271 - protein, 10 aa, synthetic construct
VGMSYEYPEY

SEQ ID NO: 23272 - protein, 11 aa, synthetic construct
SLCVGLSAGYI

SEQ ID NO: 23273 - protein, 9 aa, synthetic construct
QYAGWLEVF

SEQ ID NO: 23274 - protein, 9 aa, synthetic construct
TSINNMAAF

SEQ ID NO: 23275 - protein, 8 aa, synthetic construct
ACAMTFKN

SEQ ID NO: 23276 - protein, 10 aa, synthetic construct
TAEGFLFVVG

SEQ ID NO: 23277 - protein, 8 aa, synthetic construct
ILDLYMLY

SEQ ID NO: 23278 - protein, 9 aa, synthetic construct
IIHTGENLY

SEQ ID NO: 23279 - protein, 9 aa, synthetic construct
KEAHGEILY

SEQ ID NO: 23280 - protein, 10 aa, synthetic construct
VPLPEASVGP

SEQ ID NO: 23281 - protein, 9 aa, synthetic construct
VTAEEAGLY

SEQ ID NO: 23282 - protein, 10 aa, synthetic construct
VPGDSETLTF

SEQ ID NO: 23283 - protein, 11 aa, synthetic construct
AHPVYNMVAGW

SEQ ID NO: 23284 - protein, 8 aa, synthetic construct
EKDVLLLF

SEQ ID NO: 23285 - protein, 14 aa, synthetic construct
LKSGTATAAGTGPG

SEQ ID NO: 23286 - protein, 8 aa, synthetic construct
TAEQQERF

SEQ ID NO: 23287 - protein, 9 aa, synthetic construct
ITMQDGFTY

SEQ ID NO: 23288 - protein, 10 aa, synthetic construct
SLARQPAFPG

SEQ ID NO: 23289 - protein, 10 aa, synthetic construct
TATAAEHDLK

SEQ ID NO: 23290 - protein, 11 aa, synthetic construct
GYVPGLGRGAT

SEQ ID NO: 23291 - protein, 9 aa, synthetic construct
LSAAFIAYA

SEQ ID NO: 23292 - protein, 9 aa, synthetic construct
FTAFLHPEE

SEQ ID NO: 23293 - protein, 10 aa, synthetic construct
YVGFNATYTA

SEQ ID NO: 23294 - protein, 10 aa, synthetic construct
TCTSGLLEDY

SEQ ID NO: 23295 - protein, 12 aa, synthetic construct
ISSMNQLGGLFV

SEQ ID NO: 23296 - protein, 9 aa, synthetic construct
ATFAAYEPL

SEQ ID NO: 23297 - protein, 9 aa, synthetic construct
EGPPGPPGF

SEQ ID NO: 23298 - protein, 10 aa, synthetic construct
PEQQRLAAGY

SEQ ID NO: 23299 - protein, 7 aa, synthetic construct
DYKYQKL

SEQ ID NO: 23300 - protein, 8 aa, synthetic construct
LFSTAQYK

SEQ ID NO: 23301 - protein, 9 aa, synthetic construct
IGAASQTCY

SEQ ID NO: 23302 - protein, 10 aa, synthetic construct
TEVGCSNIAY

SEQ ID NO: 23303 - protein, 8 aa, synthetic construct
NTFEQEIY

SEQ ID NO: 23304 - protein, 12 aa, synthetic construct
ATLTVTVPGGEK

SEQ ID NO: 23305 - protein, 8 aa, synthetic construct
GFTAVLTY

SEQ ID NO: 23306 - protein, 9 aa, synthetic construct
GAFRTQTWY

SEQ ID NO: 23307 - protein, 9 aa, synthetic construct
PFPGSFLIY

SEQ ID NO: 23308 - protein, 9 aa, synthetic construct
ATHRSIPLV

SEQ ID NO: 23309 - protein, 8 aa, synthetic construct
YQECCTIA

SEQ ID NO: 23310 - protein, 9 aa, synthetic construct
TALHSKPEI

SEQ ID NO: 23311 - protein, 9 aa, synthetic construct
LTTGSTTLP

SEQ ID NO: 23312 - protein, 9 aa, synthetic construct
SLSSPIPYP

SEQ ID NO: 23313 - protein, 9 aa, synthetic construct
ERIGSVLTY

SEQ ID NO: 23314 - protein, 9 aa, synthetic construct
RATEALQTF

SEQ ID NO: 23315 - protein, 8 aa, synthetic construct
VRSVHHVI

SEQ ID NO: 23316 - protein, 10 aa, synthetic construct
ATLSHPNFPG

SEQ ID NO: 23317 - protein, 11 aa, synthetic construct
IFIGSPTPPAG

SEQ ID NO: 23318 - protein, 9 aa, synthetic construct
SVVSLYFLE

SEQ ID NO: 23319 - protein, 10 aa, synthetic construct
ATIALVGTAF

SEQ ID NO: 23320 - protein, 10 aa, synthetic construct
ATENIPPPPV

SEQ ID NO: 23321 - protein, 9 aa, synthetic construct
YDPRFTGSF

SEQ ID NO: 23322 - protein, 9 aa, synthetic construct
VSYDPITAF

SEQ ID NO: 23323 - protein, 9 aa, synthetic construct
TILFGAAYT

SEQ ID NO: 23324 - protein, 9 aa, synthetic construct
YGIWNTAIQ

SEQ ID NO: 23325 - protein, 10 aa, synthetic construct
ATLRAFKINE

SEQ ID NO: 23326 - protein, 8 aa, synthetic construct
LKVKYLAT

SEQ ID NO: 23327 - protein, 10 aa, synthetic construct
ATLNIIHSVV

SEQ ID NO: 23328 - protein, 9 aa, synthetic construct
RSDQVNLGP

SEQ ID NO: 23329 - protein, 9 aa, synthetic construct
VINSALDLY

SEQ ID NO: 23330 - protein, 9 aa, synthetic construct
TLKGRLLSL

SEQ ID NO: 23331 - protein, 8 aa, synthetic construct
LFPLLLQY

SEQ ID NO: 23332 - protein, 8 aa, synthetic construct
YILIENIH

SEQ ID NO: 23333 - protein, 10 aa, synthetic construct
TALSSWAVSF

SEQ ID NO: 23334 - protein, 8 aa, synthetic construct
VEEKMFSL

SEQ ID NO: 23335 - protein, 9 aa, synthetic construct
YAGEPYVAI

SEQ ID NO: 23336 - protein, 11 aa, synthetic construct
GPQSAQLSGAM

SEQ ID NO: 23337 - protein, 9 aa, synthetic construct
ATSLMQLLL

SEQ ID NO: 23338 - protein, 8 aa, synthetic construct
LTQQLAAM

SEQ ID NO: 23339 - protein, 10 aa, synthetic construct
VTCTAGIGTF

SEQ ID NO: 23340 - protein, 10 aa, synthetic construct
SGTGALTTVF

SEQ ID NO: 23341 - protein, 9 aa, synthetic construct
SPPTAAAAV

SEQ ID NO: 23342 - protein, 9 aa, synthetic construct
PALTPGATL

SEQ ID NO: 23343 - protein, 9 aa, synthetic construct
ATLAIPCSL

SEQ ID NO: 23344 - protein, 8 aa, synthetic construct
LATPAPLT

SEQ ID NO: 23345 - protein, 9 aa, synthetic construct
LEITPATSL

SEQ ID NO: 23346 - protein, 8 aa, synthetic construct
VPVLATVV

SEQ ID NO: 23347 - protein, 8 aa, synthetic construct
TAKGFYDL

SEQ ID NO: 23348 - protein, 9 aa, synthetic construct
ITGPEGIEI

SEQ ID NO: 23349 - protein, 9 aa, synthetic construct
DPFLFNIDF

SEQ ID NO: 23350 - protein, 10 aa, synthetic construct
MGDIFGTETF

SEQ ID NO: 23351 - protein, 11 aa, synthetic construct
DSPASASQEPS

SEQ ID NO: 23352 - protein, 9 aa, synthetic construct
LTAKSELIY

SEQ ID NO: 23353 - protein, 8 aa, synthetic construct
ENSFLIVI

SEQ ID NO: 23354 - protein, 9 aa, synthetic construct
TEKDYGTIY

SEQ ID NO: 23355 - protein, 9 aa, synthetic construct
GSEDFLLVL

SEQ ID NO: 23356 - protein, 9 aa, synthetic construct
ASITLCVVL

SEQ ID NO: 23357 - protein, 8 aa, synthetic construct
EKTPAVSI

SEQ ID NO: 23358 - protein, 8 aa, synthetic construct
QKYPVHIY

SEQ ID NO: 23359 - protein, 9 aa, synthetic construct
SLGSTALDL

SEQ ID NO: 23360 - protein, 9 aa, synthetic construct
TADTILRSL

SEQ ID NO: 23361 - protein, 9 aa, synthetic construct
LSDSETLSF

SEQ ID NO: 23362 - protein, 9 aa, synthetic construct
FDISSLMLY

SEQ ID NO: 23363 - protein, 11 aa, synthetic construct
GDVGMATPEVI

SEQ ID NO: 23364 - protein, 9 aa, synthetic construct
TPEPDPADS

SEQ ID NO: 23365 - protein, 9 aa, synthetic construct
SAMSHPPSD

SEQ ID NO: 23366 - protein, 8 aa, synthetic construct
QILDTPEM

SEQ ID NO: 23367 - protein, 10 aa, synthetic construct
VTASTDGIGF

SEQ ID NO: 23368 - protein, 9 aa, synthetic construct
LTSALGQSF

SEQ ID NO: 23369 - protein, 10 aa, synthetic construct
TAVIGVVVVL

SEQ ID NO: 23370 - protein, 8 aa, synthetic construct
TALASFLY

SEQ ID NO: 23371 - protein, 8 aa, synthetic construct
VTLQFELI

SEQ ID NO: 23372 - protein, 9 aa, synthetic construct
SLAERTEGF

SEQ ID NO: 23373 - protein, 9 aa, synthetic construct
ALSTDLGVY

SEQ ID NO: 23374 - protein, 9 aa, synthetic construct
LDIIDTAVF

SEQ ID NO: 23375 - protein, 12 aa, synthetic construct
NTGPYGLVGVPG

SEQ ID NO: 23376 - protein, 8 aa, synthetic construct
VTAEKLIY

SEQ ID NO: 23377 - protein, 9 aa, synthetic construct
VTAPNLSLF

SEQ ID NO: 23378 - protein, 9 aa, synthetic construct
LLASPVQSF

SEQ ID NO: 23379 - protein, 11 aa, synthetic construct
EIKEISDANYV

SEQ ID NO: 23380 - protein, 10 aa, synthetic construct
LSAKASKGTR

SEQ ID NO: 23381 - protein, 9 aa, synthetic construct
TLLGTALAF

SEQ ID NO: 23382 - protein, 10 aa, synthetic construct
IMAVDGTLVY

SEQ ID NO: 23383 - protein, 9 aa, synthetic construct
ATVPKTIIY

SEQ ID NO: 23384 - protein, 8 aa, synthetic construct
YPFKKVSY

SEQ ID NO: 23385 - protein, 9 aa, synthetic construct
FGEVPSATV

SEQ ID NO: 23386 - protein, 9 aa, synthetic construct
TDIAVSEIF

SEQ ID NO: 23387 - protein, 8 aa, synthetic construct
TLGVHKVL

SEQ ID NO: 23388 - protein, 8 aa, synthetic construct
GISLPLVY

SEQ ID NO: 23389 - protein, 16 aa, synthetic construct
GAGSQSGGGGAWPPSP

SEQ ID NO: 23390 - protein, 10 aa, synthetic construct
ATGADRSDYY

SEQ ID NO: 23391 - protein, 13 aa, synthetic construct
GPAHIPPGSPPVF

SEQ ID NO: 23392 - protein, 11 aa, synthetic construct
TAWINPPQISE

SEQ ID NO: 23393 - protein, 9 aa, synthetic construct
LIWATYYES

SEQ ID NO: 23394 - protein, 9 aa, synthetic construct
ATYQMTVEL

SEQ ID NO: 23395 - protein, 9 aa, synthetic construct
TAAKLVHPI

SEQ ID NO: 23396 - protein, 9 aa, synthetic construct
LTSFNGLVS

SEQ ID NO: 23397 - protein, 9 aa, synthetic construct
TAKFDVLEH

SEQ ID NO: 23398 - protein, 8 aa, synthetic construct
VNVTMSTF

SEQ ID NO: 23399 - protein, 8 aa, synthetic construct
MGILNSYT

SEQ ID NO: 23400 - protein, 9 aa, synthetic construct
VFSDVNSMY

SEQ ID NO: 23401 - protein, 9 aa, synthetic construct
AVISDAMYI

SEQ ID NO: 23402 - protein, 10 aa, synthetic construct
TSSQSAAYAI

SEQ ID NO: 23403 - protein, 9 aa, synthetic construct
MVETTAYAL

SEQ ID NO: 23404 - protein, 9 aa, synthetic construct
AYVEEMKKI

SEQ ID NO: 23405 - protein, 11 aa, synthetic construct
SLADMVRSLKF

SEQ ID NO: 23406 - protein, 10 aa, synthetic construct
SKSTAAMSTY

SEQ ID NO: 23407 - protein, 9 aa, synthetic construct
SFDAVQLLL

SEQ ID NO: 23408 - protein, 10 aa, synthetic construct
MAVDGINQFT

SEQ ID NO: 23409 - protein, 10 aa, synthetic construct
LFSMAANQVF

SEQ ID NO: 23410 - protein, 8 aa, synthetic construct
MNTQLPTL

SEQ ID NO: 23411 - protein, 9 aa, synthetic construct
GMKDSLVYC

SEQ ID NO: 23412 - protein, 9 aa, synthetic construct
TCWMDSLKN

SEQ ID NO: 23413 - protein, 9 aa, synthetic construct
DTALHDAVR

SEQ ID NO: 23414 - protein, 9 aa, synthetic construct
TDHFLATFY

SEQ ID NO: 23415 - protein, 9 aa, synthetic construct
TPYPTISSI

SEQ ID NO: 23416 - protein, 9 aa, synthetic construct
VIETALLFL

SEQ ID NO: 23417 - protein, 8 aa, synthetic construct
PPQIDMLY

SEQ ID NO: 23418 - protein, 8 aa, synthetic construct
SEITNHIY

SEQ ID NO: 23419 - protein, 10 aa, synthetic construct
TEADAPSQGR

SEQ ID NO: 23420 - protein, 9 aa, synthetic construct
TENLSVIVL

SEQ ID NO: 23421 - protein, 9 aa, synthetic construct
ETAEHLDLA

SEQ ID NO: 23422 - protein, 9 aa, synthetic construct
TEAEIQQLK

SEQ ID NO: 23423 - protein, 8 aa, synthetic construct
ETAPVQPK

SEQ ID NO: 23424 - protein, 9 aa, synthetic construct
QTSVPLLFA

SEQ ID NO: 23425 - protein, 9 aa, synthetic construct
TFDEIVDTL

SEQ ID NO: 23426 - protein, 10 aa, synthetic construct
NELYPYIVEF

SEQ ID NO: 23427 - protein, 10 aa, synthetic construct
ETVGQLGTVL

SEQ ID NO: 23428 - protein, 8 aa, synthetic construct
TEELYAIK

SEQ ID NO: 23429 - protein, 12 aa, synthetic construct
MQLPVAMEAATN

SEQ ID NO: 23430 - protein, 12 aa, synthetic construct
LSSSETTKHATN

SEQ ID NO: 23431 - protein, 9 aa, synthetic construct
DVNAEPDSF

SEQ ID NO: 23432 - protein, 8 aa, synthetic construct
ITTFEFTL

SEQ ID NO: 23433 - protein, 8 aa, synthetic construct
FEVVYHTA

SEQ ID NO: 23434 - protein, 8 aa, synthetic construct
TVLGAFDP

SEQ ID NO: 23435 - protein, 10 aa, synthetic construct
TEHFMAAGYT

SEQ ID NO: 23436 - protein, 9 aa, synthetic construct
IVHQQIHTE

SEQ ID NO: 23437 - protein, 10 aa, synthetic construct
QHPPLDPRLT

SEQ ID NO: 23438 - protein, 10 aa, synthetic construct
ETLSLDVNSI

SEQ ID NO: 23439 - protein, 9 aa, synthetic construct
REMEVPPLP

SEQ ID NO: 23440 - protein, 9 aa, synthetic construct
TEDLKTLSA

SEQ ID NO: 23441 - protein, 8 aa, synthetic construct
TEIETWVR

SEQ ID NO: 23442 - protein, 10 aa, synthetic construct
EEKKYMELDP

SEQ ID NO: 23443 - protein, 9 aa, synthetic construct
ETIEALRMA

SEQ ID NO: 23444 - protein, 9 aa, synthetic construct
EPYSATLSV

SEQ ID NO: 23445 - protein, 9 aa, synthetic construct
LTLEEIIGI

SEQ ID NO: 23446 - protein, 9 aa, synthetic construct
TVSETDIIP

SEQ ID NO: 23447 - protein, 10 aa, synthetic construct
TEAVAILTAT

SEQ ID NO: 23448 - protein, 10 aa, synthetic construct
CVLGNTTILA

SEQ ID NO: 23449 - protein, 9 aa, synthetic construct
LQPEFMILA

SEQ ID NO: 23450 - protein, 10 aa, synthetic construct
TEIRAMKGEI

SEQ ID NO: 23451 - protein, 11 aa, synthetic construct
TELTDLAVGCI

SEQ ID NO: 23452 - protein, 9 aa, synthetic construct
TQPTPQVVL

SEQ ID NO: 23453 - protein, 8 aa, synthetic construct
LKKFPETL

SEQ ID NO: 23454 - protein, 9 aa, synthetic construct
TEIKEAFLA

SEQ ID NO: 23455 - protein, 10 aa, synthetic construct
TELEIEGARA

SEQ ID NO: 23456 - protein, 9 aa, synthetic construct
VPAQPSLYS

SEQ ID NO: 23457 - protein, 8 aa, synthetic construct
TDLLHLSY

SEQ ID NO: 23458 - protein, 9 aa, synthetic construct
LETLRLKLP

SEQ ID NO: 23459 - protein, 10 aa, synthetic construct
ETMTVTLLDA

SEQ ID NO: 23460 - protein, 9 aa, synthetic construct
NYQEDTVFF

SEQ ID NO: 23461 - protein, 10 aa, synthetic construct
TEDQSFNDLA

SEQ ID NO: 23462 - protein, 12 aa, synthetic construct
KVVFDTGSSNVW

SEQ ID NO: 23463 - protein, 10 aa, synthetic construct
VVVMDSALEA

SEQ ID NO: 23464 - protein, 10 aa, synthetic construct
APFVFAEVNA

SEQ ID NO: 23465 - protein, 8 aa, synthetic construct
TWMFLLLL

SEQ ID NO: 23466 - protein, 9 aa, synthetic construct
TVDATGKEI

SEQ ID NO: 23467 - protein, 9 aa, synthetic construct
TSSAPCLGI

SEQ ID NO: 23468 - protein, 9 aa, synthetic construct
NSPETEVAL

SEQ ID NO: 23469 - protein, 10 aa, synthetic construct
DTGSALVLTI

SEQ ID NO: 23470 - protein, 8 aa, synthetic construct
TMWPLTGL

SEQ ID NO: 23471 - protein, 9 aa, synthetic construct
CQGSVQDDA

SEQ ID NO: 23472 - protein, 9 aa, synthetic construct
TESLFLDLL

SEQ ID NO: 23473 - protein, 9 aa, synthetic construct
ATLLANDPV

SEQ ID NO: 23474 - protein, 9 aa, synthetic construct
TEVAEPLKA

SEQ ID NO: 23475 - protein, 9 aa, synthetic construct
LTADPPPPP

SEQ ID NO: 23476 - protein, 11 aa, synthetic construct
ETVQGTDSKDL

SEQ ID NO: 23477 - protein, 10 aa, synthetic construct
TEEFNDLLDL

SEQ ID NO: 23478 - protein, 9 aa, synthetic construct
TEVELNNIE

SEQ ID NO: 23479 - protein, 9 aa, synthetic construct
TEVATNLVI

SEQ ID NO: 23480 - protein, 8 aa, synthetic construct
IEPVETHY

SEQ ID NO: 23481 - protein, 11 aa, synthetic construct
LISAVPSIVPD

SEQ ID NO: 23482 - protein, 9 aa, synthetic construct
TEVLILLYF

SEQ ID NO: 23483 - protein, 11 aa, synthetic construct
VGRLLDLLVPD

SEQ ID NO: 23484 - protein, 11 aa, synthetic construct
LLDTLLGTKHV

SEQ ID NO: 23485 - protein, 12 aa, synthetic construct
TTAIPGLIPDLV

SEQ ID NO: 23486 - protein, 9 aa, synthetic construct
LSELREVSL

SEQ ID NO: 23487 - protein, 9 aa, synthetic construct
ELLDNAVDP

SEQ ID NO: 23488 - protein, 9 aa, synthetic construct
ESGTFPLFL

SEQ ID NO: 23489 - protein, 10 aa, synthetic construct
TEEYIDFLLN

SEQ ID NO: 23490 - protein, 11 aa, synthetic construct
GAAEDPQTTLA

SEQ ID NO: 23491 - protein, 9 aa, synthetic construct
TFLYEILLT

SEQ ID NO: 23492 - protein, 9 aa, synthetic construct
THMQNIKDI

SEQ ID NO: 23493 - protein, 11 aa, synthetic construct
GSNGFGFDVPP

SEQ ID NO: 23494 - protein, 8 aa, synthetic construct
TFMKQYPK

SEQ ID NO: 23495 - protein, 9 aa, synthetic construct
FTGESYTVL

SEQ ID NO: 23496 - protein, 9 aa, synthetic construct
TFALHQRCI

SEQ ID NO: 23497 - protein, 8 aa, synthetic construct
TFDLQMKF

SEQ ID NO: 23498 - protein, 9 aa, synthetic construct
FTDVDLHAY

SEQ ID NO: 23499 - protein, 10 aa, synthetic construct
RVSFLDNSGS

SEQ ID NO: 23500 - protein, 9 aa, synthetic construct
VADYIADTF

SEQ ID NO: 23501 - protein, 8 aa, synthetic construct
ITFDEIVN

SEQ ID NO: 23502 - protein, 8 aa, synthetic construct
MDFREILM

SEQ ID NO: 23503 - protein, 10 aa, synthetic construct
FTDAAHGFLM

SEQ ID NO: 23504 - protein, 9 aa, synthetic construct
MVTSKNKKK

SEQ ID NO: 23505 - protein, 8 aa, synthetic construct
EAYLENTF

SEQ ID NO: 23506 - protein, 9 aa, synthetic construct
LSFIDTVYS

SEQ ID NO: 23507 - protein, 9 aa, synthetic construct
TDYINASYI

SEQ ID NO: 23508 - protein, 10 aa, synthetic construct
GTAIEQKDMV

SEQ ID NO: 23509 - protein, 9 aa, synthetic construct
FDTAMIISY

SEQ ID NO: 23510 - protein, 9 aa, synthetic construct
TFDAQIVII

SEQ ID NO: 23511 - protein, 8 aa, synthetic construct
THTVDFTF

SEQ ID NO: 23512 - protein, 9 aa, synthetic construct
TFLNGSRIP

SEQ ID NO: 23513 - protein, 12 aa, synthetic construct
FTGEVISSVSEL

SEQ ID NO: 23514 - protein, 9 aa, synthetic construct
TPTYTLSIL

SEQ ID NO: 23515 - protein, 9 aa, synthetic construct
TEVDFAFTV

SEQ ID NO: 23516 - protein, 11 aa, synthetic construct
TFLLALFCITK

SEQ ID NO: 23517 - protein, 12 aa, synthetic construct
LLKPPTSRNAET

SEQ ID NO: 23518 - protein, 9 aa, synthetic construct
LLDSEFIDH

SEQ ID NO: 23519 - protein, 10 aa, synthetic construct
TFLRGLQGSL

SEQ ID NO: 23520 - protein, 9 aa, synthetic construct
TTNYLIVSL

SEQ ID NO: 23521 - protein, 11 aa, synthetic construct
VDDGAFTAGLA

SEQ ID NO: 23522 - protein, 10 aa, synthetic construct
LQPAKERPET

SEQ ID NO: 23523 - protein, 9 aa, synthetic construct
TFPRPRIMY

SEQ ID NO: 23524 - protein, 9 aa, synthetic construct
SFSQQMPET

SEQ ID NO: 23525 - protein, 10 aa, synthetic construct
AFGTIMETVI

SEQ ID NO: 23526 - protein, 12 aa, synthetic construct
FTGEGATAHLET

SEQ ID NO: 23527 - protein, 11 aa, synthetic construct
FTTESFTRGST

SEQ ID NO: 23528 - protein, 8 aa, synthetic construct
LAYWETAI

SEQ ID NO: 23529 - protein, 8 aa, synthetic construct
TTIQEEFY

SEQ ID NO: 23530 - protein, 10 aa, synthetic construct
YCNSNEWQVY

SEQ ID NO: 23531 - protein, 8 aa, synthetic construct
HVESYRTM

SEQ ID NO: 23532 - protein, 8 aa, synthetic construct
TGFLKNFL

SEQ ID NO: 23533 - protein, 8 aa, synthetic construct
FLGTTTEV

SEQ ID NO: 23534 - protein, 9 aa, synthetic construct
DVKLTVKSM

SEQ ID NO: 23535 - protein, 10 aa, synthetic construct
SLAVLGTGGS

SEQ ID NO: 23536 - protein, 9 aa, synthetic construct
SGIINLGTS

SEQ ID NO: 23537 - protein, 11 aa, synthetic construct
TGPLPSAVFPR

SEQ ID NO: 23538 - protein, 11 aa, synthetic construct
SAPTARRPKAS

SEQ ID NO: 23539 - protein, 10 aa, synthetic construct
ASPRVQRQVT

SEQ ID NO: 23540 - protein, 12 aa, synthetic construct
SWDAPPSTISPG

SEQ ID NO: 23541 - protein, 12 aa, synthetic construct
PGPNLMDTIGPS

SEQ ID NO: 23542 - protein, 13 aa, synthetic construct
APGCGQGLTLSPG

SEQ ID NO: 23543 - protein, 9 aa, synthetic construct
ETHSEGSEY

SEQ ID NO: 23544 - protein, 9 aa, synthetic construct
QDLIKMTAI

SEQ ID NO: 23545 - protein, 9 aa, synthetic construct
SSFLQSVLS

SEQ ID NO: 23546 - protein, 9 aa, synthetic construct
MHCLGAEYL

SEQ ID NO: 23547 - protein, 9 aa, synthetic construct
THAGLNIVT

SEQ ID NO: 23548 - protein, 11 aa, synthetic construct
THCHSQGTVPH

SEQ ID NO: 23549 - protein, 10 aa, synthetic construct
DEVLHFNEFS

SEQ ID NO: 23550 - protein, 9 aa, synthetic construct
TLGLGASAL

SEQ ID NO: 23551 - protein, 8 aa, synthetic construct
VKALKYTL

SEQ ID NO: 23552 - protein, 9 aa, synthetic construct
TALSALPAY

SEQ ID NO: 23553 - protein, 9 aa, synthetic construct
VLIDDLTTL

SEQ ID NO: 23554 - protein, 9 aa, synthetic construct
NGTLEIFEV

SEQ ID NO: 23555 - protein, 9 aa, synthetic construct
TILDDGIER

SEQ ID NO: 23556 - protein, 10 aa, synthetic construct
TVLGYGLLTA

SEQ ID NO: 23557 - protein, 8 aa, synthetic construct
QFKHSLTI

SEQ ID NO: 23558 - protein, 9 aa, synthetic construct
KAFLVKRLT

SEQ ID NO: 23559 - protein, 8 aa, synthetic construct
YLCKSLVP

SEQ ID NO: 23560 - protein, 8 aa, synthetic construct
TILDMRSK

SEQ ID NO: 23561 - protein, 11 aa, synthetic construct
LTEVLPRTAVV

SEQ ID NO: 23562 - protein, 11 aa, synthetic construct
LTLRPAAMMVL

SEQ ID NO: 23563 - protein, 11 aa, synthetic construct
LTIDNDFLLSL

SEQ ID NO: 23564 - protein, 11 aa, synthetic construct
TLLDTSKAVAI

SEQ ID NO: 23565 - protein, 10 aa, synthetic construct
ITLECSSPGR

SEQ ID NO: 23566 - protein, 9 aa, synthetic construct
TLIERLVDY

SEQ ID NO: 23567 - protein, 9 aa, synthetic construct
IEFYIQLPV

SEQ ID NO: 23568 - protein, 9 aa, synthetic construct
LTLHNNEVR

SEQ ID NO: 23569 - protein, 10 aa, synthetic construct
TILNCLQGAF

SEQ ID NO: 23570 - protein, 11 aa, synthetic construct
NPSSHGQTIPV

SEQ ID NO: 23571 - protein, 11 aa, synthetic construct
TILPHGASFHG

SEQ ID NO: 23572 - protein, 9 aa, synthetic construct
LTSTVIPEF

SEQ ID NO: 23573 - protein, 10 aa, synthetic construct
TLVFGPIYLL

SEQ ID NO: 23574 - protein, 11 aa, synthetic construct
ITKLSLGTFQA

SEQ ID NO: 23575 - protein, 12 aa, synthetic construct
TPGTAPPPKVLT

SEQ ID NO: 23576 - protein, 11 aa, synthetic construct
TFGQLSALKTL

SEQ ID NO: 23577 - protein, 10 aa, synthetic construct
TLPLLIPPRI

SEQ ID NO: 23578 - protein, 9 aa, synthetic construct
ITKLDDGTY

SEQ ID NO: 23579 - protein, 9 aa, synthetic construct
TIKYKQIKP

SEQ ID NO: 23580 - protein, 10 aa, synthetic construct
ITIGTVGMIV

SEQ ID NO: 23581 - protein, 10 aa, synthetic construct
TIMTGVIGVI

SEQ ID NO: 23582 - protein, 8 aa, synthetic construct
TLMLHPVI

SEQ ID NO: 23583 - protein, 9 aa, synthetic construct
LTVALHGGR

SEQ ID NO: 23584 - protein, 8 aa, synthetic construct
TIVHAVQR

SEQ ID NO: 23585 - protein, 12 aa, synthetic construct
TLARSLGLQMPV

SEQ ID NO: 23586 - protein, 9 aa, synthetic construct
TINFRFPSE

SEQ ID NO: 23587 - protein, 9 aa, synthetic construct
TLNEEKLTY

SEQ ID NO: 23588 - protein, 8 aa, synthetic construct
NTLLHKVP

SEQ ID NO: 23589 - protein, 10 aa, synthetic construct
ITIPEIATSE

SEQ ID NO: 23590 - protein, 9 aa, synthetic construct
TMIEVLISD

SEQ ID NO: 23591 - protein, 9 aa, synthetic construct
TLLNTPNIS

SEQ ID NO: 23592 - protein, 8 aa, synthetic construct
RNITLPHL

SEQ ID NO: 23593 - protein, 9 aa, synthetic construct
MSVRTLPLL

SEQ ID NO: 23594 - protein, 11 aa, synthetic construct
ITDAEQRGELA

SEQ ID NO: 23595 - protein, 9 aa, synthetic construct
TESLSILDL

SEQ ID NO: 23596 - protein, 10 aa, synthetic construct
GVSKPLPSVP

SEQ ID NO: 23597 - protein, 9 aa, synthetic construct
TLSSRETAI

SEQ ID NO: 23598 - protein, 8 aa, synthetic construct
TVYYRSEF

SEQ ID NO: 23599 - protein, 10 aa, synthetic construct
TLMPVNTVAL

SEQ ID NO: 23600 - protein, 11 aa, synthetic construct
TLERSSPATIA

SEQ ID NO: 23601 - protein, 13 aa, synthetic construct
TLSKPAALTGTLE

SEQ ID NO: 23602 - protein, 9 aa, synthetic construct
TKIITAIWI

SEQ ID NO: 23603 - protein, 10 aa, synthetic construct
GVGGLRGTFF

SEQ ID NO: 23604 - protein, 9 aa, synthetic construct
SLSASTEPA

SEQ ID NO: 23605 - protein, 11 aa, synthetic construct
SADALLTLPPS

SEQ ID NO: 23606 - protein, 11 aa, synthetic construct
TIIGELGLDPG

SEQ ID NO: 23607 - protein, 10 aa, synthetic construct
TLAACVASIV

SEQ ID NO: 23608 - protein, 9 aa, synthetic construct
TISQGPRFV

SEQ ID NO: 23609 - protein, 9 aa, synthetic construct
LSVVEIVLL

SEQ ID NO: 23610 - protein, 10 aa, synthetic construct
TLAVAVNRTV

SEQ ID NO: 23611 - protein, 9 aa, synthetic construct
SFTILYEEP

SEQ ID NO: 23612 - protein, 9 aa, synthetic construct
TENGLTAWD

SEQ ID NO: 23613 - protein, 9 aa, synthetic construct
LSEELVAAV

SEQ ID NO: 23614 - protein, 9 aa, synthetic construct
LTEEGTTPL

SEQ ID NO: 23615 - protein, 9 aa, synthetic construct
TLEDKVAEI

SEQ ID NO: 23616 - protein, 9 aa, synthetic construct
LTGDGHLSL

SEQ ID NO: 23617 - protein, 8 aa, synthetic construct
LTDIHAKD

SEQ ID NO: 23618 - protein, 8 aa, synthetic construct
ITPDNVEK

SEQ ID NO: 23619 - protein, 11 aa, synthetic construct
SEIQPASASKH

SEQ ID NO: 23620 - protein, 9 aa, synthetic construct
YVTFEDVAV

SEQ ID NO: 23621 - protein, 9 aa, synthetic construct
VDFYDLTLG

SEQ ID NO: 23622 - protein, 9 aa, synthetic construct
TLFTVMCRK

SEQ ID NO: 23623 - protein, 10 aa, synthetic construct
TLFGNYTLLN

SEQ ID NO: 23624 - protein, 9 aa, synthetic construct
QKFIKAITL

SEQ ID NO: 23625 - protein, 9 aa, synthetic construct
LPGYSSAEY

SEQ ID NO: 23626 - protein, 9 aa, synthetic construct
TNVGLISLV

SEQ ID NO: 23627 - protein, 8 aa, synthetic construct
TGPVLPLE

SEQ ID NO: 23628 - protein, 9 aa, synthetic construct
TLDKSMSGY

SEQ ID NO: 23629 - protein, 9 aa, synthetic construct
GFTLNAESY

SEQ ID NO: 23630 - protein, 10 aa, synthetic construct
GSSLPSGAYY

SEQ ID NO: 23631 - protein, 8 aa, synthetic construct
NTAIIWDV

SEQ ID NO: 23632 - protein, 12 aa, synthetic construct
TLHGEVRGHSTR

SEQ ID NO: 23633 - protein, 12 aa, synthetic construct
PQVPPRHEGHVP

SEQ ID NO: 23634 - protein, 9 aa, synthetic construct
IHPDITGTD

SEQ ID NO: 23635 - protein, 9 aa, synthetic construct
TLPDGHLTD

SEQ ID NO: 23636 - protein, 10 aa, synthetic construct
TLLACRPSFM

SEQ ID NO: 23637 - protein, 10 aa, synthetic construct
TLLAGVCWTL

SEQ ID NO: 23638 - protein, 10 aa, synthetic construct
LPDMLPDLPV

SEQ ID NO: 23639 - protein, 9 aa, synthetic construct
LTSDIIESI

SEQ ID NO: 23640 - protein, 8 aa, synthetic construct
TMPNKLLR

SEQ ID NO: 23641 - protein, 9 aa, synthetic construct
VSTLILISI

SEQ ID NO: 23642 - protein, 9 aa, synthetic construct
TRILPNGEK

SEQ ID NO: 23643 - protein, 9 aa, synthetic construct
TSLALLEEY

SEQ ID NO: 23644 - protein, 9 aa, synthetic construct
TLQKVKNVL

SEQ ID NO: 23645 - protein, 9 aa, synthetic construct
TLKITERAL

SEQ ID NO: 23646 - protein, 9 aa, synthetic construct
SALELIYEI

SEQ ID NO: 23647 - protein, 9 aa, synthetic construct
LFESLLNGL

SEQ ID NO: 23648 - protein, 10 aa, synthetic construct
TLLVVQVSIL

SEQ ID NO: 23649 - protein, 10 aa, synthetic construct
TLLDPDSCRK

SEQ ID NO: 23650 - protein, 9 aa, synthetic construct
TLLPLHQEV

SEQ ID NO: 23651 - protein, 9 aa, synthetic construct
LTLMETLEI

SEQ ID NO: 23652 - protein, 9 aa, synthetic construct
PRESNITVL

SEQ ID NO: 23653 - protein, 9 aa, synthetic construct
TILLNTKRL

SEQ ID NO: 23654 - protein, 12 aa, synthetic construct
TALQAQPGSIVP

SEQ ID NO: 23655 - protein, 10 aa, synthetic construct
AAVSTLNITL

SEQ ID NO: 23656 - protein, 10 aa, synthetic construct
ISTLPESLLS

SEQ ID NO: 23657 - protein, 9 aa, synthetic construct
IPTIALPEG

SEQ ID NO: 23658 - protein, 9 aa, synthetic construct
TIPIPNGVV

SEQ ID NO: 23659 - protein, 10 aa, synthetic construct
PGIKVDSLTL

SEQ ID NO: 23660 - protein, 9 aa, synthetic construct
TSILPAELI

SEQ ID NO: 23661 - protein, 10 aa, synthetic construct
TIPRVDSSSL

SEQ ID NO: 23662 - protein, 10 aa, synthetic construct
TAAVEFIKTI

SEQ ID NO: 23663 - protein, 9 aa, synthetic construct
VRLKSVQGL

SEQ ID NO: 23664 - protein, 9 aa, synthetic construct
ITLVRKEEL

SEQ ID NO: 23665 - protein, 9 aa, synthetic construct
VTIVDTVTL

SEQ ID NO: 23666 - protein, 9 aa, synthetic construct
LTLSDIMVS

SEQ ID NO: 23667 - protein, 9 aa, synthetic construct
TLSVIRDYL

SEQ ID NO: 23668 - protein, 9 aa, synthetic construct
SLLDSVVGL

SEQ ID NO: 23669 - protein, 9 aa, synthetic construct
VTTVETQNL

SEQ ID NO: 23670 - protein, 9 aa, synthetic construct
TLSEARLKS

SEQ ID NO: 23671 - protein, 9 aa, synthetic construct
TLLRYSVSL

SEQ ID NO: 23672 - protein, 9 aa, synthetic construct
QAFEDVVVV

SEQ ID NO: 23673 - protein, 9 aa, synthetic construct
TLTHIYNKV

SEQ ID NO: 23674 - protein, 8 aa, synthetic construct
MRVKISYL

SEQ ID NO: 23675 - protein, 11 aa, synthetic construct
LTVKGDQGQAG

SEQ ID NO: 23676 - protein, 9 aa, synthetic construct
TIVDLHFPL

SEQ ID NO: 23677 - protein, 11 aa, synthetic construct
SPSRSAADIYI

SEQ ID NO: 23678 - protein, 10 aa, synthetic construct
AVNSKDDLPY

SEQ ID NO: 23679 - protein, 10 aa, synthetic construct
GQDKVSYEVP

SEQ ID NO: 23680 - protein, 9 aa, synthetic construct
TLYNQNLLT

SEQ ID NO: 23681 - protein, 10 aa, synthetic construct
LTYKLGEQGA

SEQ ID NO: 23682 - protein, 9 aa, synthetic construct
TLYFENRRR

SEQ ID NO: 23683 - protein, 9 aa, synthetic construct
TEYNITVLL

SEQ ID NO: 23684 - protein, 8 aa, synthetic construct
KETLYDEV

SEQ ID NO: 23685 - protein, 9 aa, synthetic construct
LTRSELMSI

SEQ ID NO: 23686 - protein, 9 aa, synthetic construct
ITRYPDTSI

SEQ ID NO: 23687 - protein, 9 aa, synthetic construct
DVDRELRKC

SEQ ID NO: 23688 - protein, 10 aa, synthetic construct
CNIFGLRPVD

SEQ ID NO: 23689 - protein, 9 aa, synthetic construct
MTVLPSEID

SEQ ID NO: 23690 - protein, 8 aa, synthetic construct
MPVTVPVS

SEQ ID NO: 23691 - protein, 10 aa, synthetic construct
SAGFQERGDF

SEQ ID NO: 23692 - protein, 8 aa, synthetic construct
TNLKERIL

SEQ ID NO: 23693 - protein, 10 aa, synthetic construct
GTGRKSFGAF

SEQ ID NO: 23694 - protein, 13 aa, synthetic construct
HSSAMAASAQPHV

SEQ ID NO: 23695 - protein, 8 aa, synthetic construct
INFTRNKL

SEQ ID NO: 23696 - protein, 9 aa, synthetic construct
LNRTITIAL

SEQ ID NO: 23697 - protein, 9 aa, synthetic construct
LSQTEVITD

SEQ ID NO: 23698 - protein, 9 aa, synthetic construct
TINESTIID

SEQ ID NO: 23699 - protein, 9 aa, synthetic construct
LTDLSQTVE

SEQ ID NO: 23700 - protein, 8 aa, synthetic construct
LSLNLSDM

SEQ ID NO: 23701 - protein, 12 aa, synthetic construct
GGTVSLLQSHGG

SEQ ID NO: 23702 - protein, 11 aa, synthetic construct
SGNPLSRLPDG

SEQ ID NO: 23703 - protein, 10 aa, synthetic construct
ESAVSRDHLV

SEQ ID NO: 23704 - protein, 11 aa, synthetic construct
VEKPRSAGDPG

SEQ ID NO: 23705 - protein, 12 aa, synthetic construct
VQSLATGPAGDP

SEQ ID NO: 23706 - protein, 10 aa, synthetic construct
TPWIVAVAVI

SEQ ID NO: 23707 - protein, 9 aa, synthetic construct
TSNNTATVI

SEQ ID NO: 23708 - protein, 9 aa, synthetic construct
FLVPTGEVF

SEQ ID NO: 23709 - protein, 10 aa, synthetic construct
TPATFETPEV

SEQ ID NO: 23710 - protein, 12 aa, synthetic construct
GNGSVVGPPEPG

SEQ ID NO: 23711 - protein, 8 aa, synthetic construct
ETNPLEML

SEQ ID NO: 23712 - protein, 8 aa, synthetic construct
TRSQDSII

SEQ ID NO: 23713 - protein, 8 aa, synthetic construct
LPNTQVLL

SEQ ID NO: 23714 - protein, 11 aa, synthetic construct
YAPSLALNAVT

SEQ ID NO: 23715 - protein, 9 aa, synthetic construct
TAPPELTPV

SEQ ID NO: 23716 - protein, 9 aa, synthetic construct
TAPPAHLTP

SEQ ID NO: 23717 - protein, 9 aa, synthetic construct
TPAPVEGVL

SEQ ID NO: 23718 - protein, 12 aa, synthetic construct
SPGPSASPGPPG

SEQ ID NO: 23719 - protein, 9 aa, synthetic construct
PSLAIRSPT

SEQ ID NO: 23720 - protein, 9 aa, synthetic construct
TPASRVLLV

SEQ ID NO: 23721 - protein, 10 aa, synthetic construct
TPCHSIWIPP

SEQ ID NO: 23722 - protein, 10 aa, synthetic construct
TPDPVLPGAR

SEQ ID NO: 23723 - protein, 10 aa, synthetic construct
ESPSLPQGSL

SEQ ID NO: 23724 - protein, 9 aa, synthetic construct
TPDLTNLMT

SEQ ID NO: 23725 - protein, 11 aa, synthetic construct
LTPDTGRILSK

SEQ ID NO: 23726 - protein, 10 aa, synthetic construct
TDPRLTKEKL

SEQ ID NO: 23727 - protein, 9 aa, synthetic construct
SFSPHNTLY

SEQ ID NO: 23728 - protein, 9 aa, synthetic construct
TPQTTLTPL

SEQ ID NO: 23729 - protein, 9 aa, synthetic construct
PDLISDALF

SEQ ID NO: 23730 - protein, 7 aa, synthetic construct
TDYRVVY

SEQ ID NO: 23731 - protein, 10 aa, synthetic construct
QTLNGSAALL

SEQ ID NO: 23732 - protein, 10 aa, synthetic construct
TPGNTAKMLI

SEQ ID NO: 23733 - protein, 9 aa, synthetic construct
KTGYNVDLL

SEQ ID NO: 23734 - protein, 9 aa, synthetic construct
VMVMGDVTY

SEQ ID NO: 23735 - protein, 9 aa, synthetic construct
TPFLGRRLL

SEQ ID NO: 23736 - protein, 12 aa, synthetic construct
LQSPACMAGVPM

SEQ ID NO: 23737 - protein, 8 aa, synthetic construct
TPEAKRKM

SEQ ID NO: 23738 - protein, 7 aa, synthetic construct
PTFNKIT

SEQ ID NO: 23739 - protein, 8 aa, synthetic construct
TTKDRSIF

SEQ ID NO: 23740 - protein, 10 aa, synthetic construct
TPSMAGIMVP

SEQ ID NO: 23741 - protein, 11 aa, synthetic construct
GRHGSQGGIVM

SEQ ID NO: 23742 - protein, 10 aa, synthetic construct
HPVQSTSLVM

SEQ ID NO: 23743 - protein, 8 aa, synthetic construct
RMWQPSGY

SEQ ID NO: 23744 - protein, 9 aa, synthetic construct
YWAAAEEYY

SEQ ID NO: 23745 - protein, 9 aa, synthetic construct
IPTYGAVVY

SEQ ID NO: 23746 - protein, 11 aa, synthetic construct
IISKTATGNYM

SEQ ID NO: 23747 - protein, 9 aa, synthetic construct
STKQTDAVY

SEQ ID NO: 23748 - protein, 8 aa, synthetic construct
TKNNKPLY

SEQ ID NO: 23749 - protein, 10 aa, synthetic construct
TPAGLGAAVY

SEQ ID NO: 23750 - protein, 11 aa, synthetic construct
TPGPAEAARVS

SEQ ID NO: 23751 - protein, 8 aa, synthetic construct
TPGWPTTL

SEQ ID NO: 23752 - protein, 9 aa, synthetic construct
PTPPPGLSY

SEQ ID NO: 23753 - protein, 9 aa, synthetic construct
PGLTFHLIF

SEQ ID NO: 23754 - protein, 8 aa, synthetic construct
SLHHPTLI

SEQ ID NO: 23755 - protein, 9 aa, synthetic construct
LSPRPRPPT

SEQ ID NO: 23756 - protein, 10 aa, synthetic construct
VRPGTPPVPT

SEQ ID NO: 23757 - protein, 10 aa, synthetic construct
TPHPKTPAHL

SEQ ID NO: 23758 - protein, 9 aa, synthetic construct
QVPESSLAF

SEQ ID NO: 23759 - protein, 8 aa, synthetic construct
TLPLLKEK

SEQ ID NO: 23760 - protein, 9 aa, synthetic construct
VEQVVLGLY

SEQ ID NO: 23761 - protein, 9 aa, synthetic construct
TTDLPAHVF

SEQ ID NO: 23762 - protein, 9 aa, synthetic construct
LEAVVTSSY

SEQ ID NO: 23763 - protein, 9 aa, synthetic construct
TSPLRIVAL

SEQ ID NO: 23764 - protein, 9 aa, synthetic construct
TPLTLEMYY

SEQ ID NO: 23765 - protein, 11 aa, synthetic construct
TLPSQCLPPSY

SEQ ID NO: 23766 - protein, 11 aa, synthetic construct
EKTPFVEGLSY

SEQ ID NO: 23767 - protein, 8 aa, synthetic construct
TPKEKNKL

SEQ ID NO: 23768 - protein, 11 aa, synthetic construct
LVPGGPAPPAE

SEQ ID NO: 23769 - protein, 9 aa, synthetic construct
TAAQVAYVL

SEQ ID NO: 23770 - protein, 9 aa, synthetic construct
TVDTRLPEF

SEQ ID NO: 23771 - protein, 9 aa, synthetic construct
GFAHEAFAW

SEQ ID NO: 23772 - protein, 9 aa, synthetic construct
DLEPLTILY

SEQ ID NO: 23773 - protein, 10 aa, synthetic construct
SSPSLPGVAY

SEQ ID NO: 23774 - protein, 8 aa, synthetic construct
VQETPLMF

SEQ ID NO: 23775 - protein, 8 aa, synthetic construct
LPTGEIVY

SEQ ID NO: 23776 - protein, 10 aa, synthetic construct
NIVSLLLSML

SEQ ID NO: 23777 - protein, 11 aa, synthetic construct
TPSLTLAPTAY

SEQ ID NO: 23778 - protein, 8 aa, synthetic construct
TLKMIKIL

SEQ ID NO: 23779 - protein, 8 aa, synthetic construct
TPKVIKLL

SEQ ID NO: 23780 - protein, 11 aa, synthetic construct
TPIPLSTLGTV

SEQ ID NO: 23781 - protein, 11 aa, synthetic construct
TIPISAPLTVS

SEQ ID NO: 23782 - protein, 10 aa, synthetic construct
PTLKVLRGTG

SEQ ID NO: 23783 - protein, 9 aa, synthetic construct
TLRPGVTVI

SEQ ID NO: 23784 - protein, 9 aa, synthetic construct
LGDLAITSL

SEQ ID NO: 23785 - protein, 9 aa, synthetic construct
VELGSVTTL

SEQ ID NO: 23786 - protein, 9 aa, synthetic construct
ISDSKIIPT

SEQ ID NO: 23787 - protein, 9 aa, synthetic construct
TPVLDSMVL

SEQ ID NO: 23788 - protein, 9 aa, synthetic construct
MTDLPAVAI

SEQ ID NO: 23789 - protein, 11 aa, synthetic construct
LNIEPSSMNIY

SEQ ID NO: 23790 - protein, 8 aa, synthetic construct
TDNNLAVY

SEQ ID NO: 23791 - protein, 9 aa, synthetic construct
TMMLVVFKS

SEQ ID NO: 23792 - protein, 10 aa, synthetic construct
GAADTCFDFF

SEQ ID NO: 23793 - protein, 8 aa, synthetic construct
TLQPNVVY

SEQ ID NO: 23794 - protein, 10 aa, synthetic construct
AISSAPFLLF

SEQ ID NO: 23795 - protein, 11 aa, synthetic construct
LVGTDLKHGAL

SEQ ID NO: 23796 - protein, 10 aa, synthetic construct
AGLGQREVAL

SEQ ID NO: 23797 - protein, 11 aa, synthetic construct
TIHSASQTISF

SEQ ID NO: 23798 - protein, 9 aa, synthetic construct
EKPVKQEEM

SEQ ID NO: 23799 - protein, 9 aa, synthetic construct
TRQAVPLTV

SEQ ID NO: 23800 - protein, 8 aa, synthetic construct
RKRPRMDI

SEQ ID NO: 23801 - protein, 9 aa, synthetic construct
TRPALPRIL

SEQ ID NO: 23802 - protein, 9 aa, synthetic construct
TPRLRQNLP

SEQ ID NO: 23803 - protein, 9 aa, synthetic construct
TRLPPRNIQ

SEQ ID NO: 23804 - protein, 10 aa, synthetic construct
EPMLEPVSAL

SEQ ID NO: 23805 - protein, 8 aa, synthetic construct
TPFPRKSV

SEQ ID NO: 23806 - protein, 10 aa, synthetic construct
PPLSTREPLL

SEQ ID NO: 23807 - protein, 10 aa, synthetic construct
TDAAARNAEL

SEQ ID NO: 23808 - protein, 9 aa, synthetic construct
PLDRAMAEL

SEQ ID NO: 23809 - protein, 9 aa, synthetic construct
RPGLEMAEI

SEQ ID NO: 23810 - protein, 10 aa, synthetic construct
ERTGPSGTVL

SEQ ID NO: 23811 - protein, 10 aa, synthetic construct
TPRDISKAVL

SEQ ID NO: 23812 - protein, 10 aa, synthetic construct
QISQNKVAVL

SEQ ID NO: 23813 - protein, 9 aa, synthetic construct
NPSDLPRSL

SEQ ID NO: 23814 - protein, 9 aa, synthetic construct
TRPAPQESL

SEQ ID NO: 23815 - protein, 8 aa, synthetic construct
AETPSPVI

SEQ ID NO: 23816 - protein, 10 aa, synthetic construct
TRSGGGDLTL

SEQ ID NO: 23817 - protein, 8 aa, synthetic construct
TLINKDCI

SEQ ID NO: 23818 - protein, 9 aa, synthetic construct
ITIHSGTFT

SEQ ID NO: 23819 - protein, 9 aa, synthetic construct
TPEMAITTL

SEQ ID NO: 23820 - protein, 9 aa, synthetic construct
TEPSSFVPL

SEQ ID NO: 23821 - protein, 8 aa, synthetic construct
TLLMTPRE

SEQ ID NO: 23822 - protein, 10 aa, synthetic construct
TPLAGFPTSL

SEQ ID NO: 23823 - protein, 9 aa, synthetic construct
TRTVQPVAM

SEQ ID NO: 23824 - protein, 9 aa, synthetic construct
TKSGVPLFY

SEQ ID NO: 23825 - protein, 10 aa, synthetic construct
TPSPISGKSL

SEQ ID NO: 23826 - protein, 10 aa, synthetic construct
TPRLSRLNLS

SEQ ID NO: 23827 - protein, 11 aa, synthetic construct
TSPLVSLYPAL

SEQ ID NO: 23828 - protein, 8 aa, synthetic construct
TPSRQPPL

SEQ ID NO: 23829 - protein, 9 aa, synthetic construct
LTPSPDIIV

SEQ ID NO: 23830 - protein, 8 aa, synthetic construct
VDYITKSY

SEQ ID NO: 23831 - protein, 9 aa, synthetic construct
TPSDLYGRL

SEQ ID NO: 23832 - protein, 9 aa, synthetic construct
DLPANLYPT

SEQ ID NO: 23833 - protein, 8 aa, synthetic construct
TQLQRLVL

SEQ ID NO: 23834 - protein, 8 aa, synthetic construct
YMKLEDYE

SEQ ID NO: 23835 - protein, 9 aa, synthetic construct
SKLVMGIPT

SEQ ID NO: 23836 - protein, 9 aa, synthetic construct
EGLLLSPTY

SEQ ID NO: 23837 - protein, 11 aa, synthetic construct
TPTPLGGMTGF

SEQ ID NO: 23838 - protein, 9 aa, synthetic construct
ALNGAGSVL

SEQ ID NO: 23839 - protein, 9 aa, synthetic construct
VSGAASPTL

SEQ ID NO: 23840 - protein, 9 aa, synthetic construct
STPTLTPSL

SEQ ID NO: 23841 - protein, 10 aa, synthetic construct
SPALGSAGSL

SEQ ID NO: 23842 - protein, 14 aa, synthetic construct
AGGGGPSASNSLLY

SEQ ID NO: 23843 - protein, 11 aa, synthetic construct
CAVSCPPSLIY

SEQ ID NO: 23844 - protein, 10 aa, synthetic construct
TELKQAAYIY

SEQ ID NO: 23845 - protein, 8 aa, synthetic construct
TPVWLLFY

SEQ ID NO: 23846 - protein, 9 aa, synthetic construct
LPSNFTPVF

SEQ ID NO: 23847 - protein, 9 aa, synthetic construct
TPVFQHLQV

SEQ ID NO: 23848 - protein, 8 aa, synthetic construct
QEKVTFEI

SEQ ID NO: 23849 - protein, 8 aa, synthetic construct
TPVLVSQL

SEQ ID NO: 23850 - protein, 9 aa, synthetic construct
IQALDVLKY

SEQ ID NO: 23851 - protein, 9 aa, synthetic construct
WVAVSPQDM

SEQ ID NO: 23852 - protein, 9 aa, synthetic construct
LQPSPLDKY

SEQ ID NO: 23853 - protein, 10 aa, synthetic construct
EHLKEPLVYM

SEQ ID NO: 23854 - protein, 9 aa, synthetic construct
SIPRSRRPT

SEQ ID NO: 23855 - protein, 11 aa, synthetic construct
GGQKPDTSGNY

SEQ ID NO: 23856 - protein, 10 aa, synthetic construct
MLFFSETLAM

SEQ ID NO: 23857 - protein, 10 aa, synthetic construct
DSRGPPPISL

SEQ ID NO: 23858 - protein, 9 aa, synthetic construct
TVPRAWLLF

SEQ ID NO: 23859 - protein, 8 aa, synthetic construct
CITQCYFY

SEQ ID NO: 23860 - protein, 9 aa, synthetic construct
TMLEAALGL

SEQ ID NO: 23861 - protein, 11 aa, synthetic construct
TPVSYMASGIC

SEQ ID NO: 23862 - protein, 9 aa, synthetic construct
TAPRMTLIL

SEQ ID NO: 23863 - protein, 8 aa, synthetic construct
VEMGVAVY

SEQ ID NO: 23864 - protein, 10 aa, synthetic construct
GLVASHEDPN

SEQ ID NO: 23865 - protein, 9 aa, synthetic construct
HVISQEDPN

SEQ ID NO: 23866 - protein, 8 aa, synthetic construct
TQHLDKIL

SEQ ID NO: 23867 - protein, 8 aa, synthetic construct
TQLRQWQL

SEQ ID NO: 23868 - protein, 8 aa, synthetic construct
TQFLTPLR

SEQ ID NO: 23869 - protein, 9 aa, synthetic construct
TAGVFLSTL

SEQ ID NO: 23870 - protein, 9 aa, synthetic construct
QTHTIFSLL

SEQ ID NO: 23871 - protein, 8 aa, synthetic construct
VKDLTLLN

SEQ ID NO: 23872 - protein, 10 aa, synthetic construct
LNSTDLKDVI

SEQ ID NO: 23873 - protein, 8 aa, synthetic construct
TLTQTLLI

SEQ ID NO: 23874 - protein, 9 aa, synthetic construct
TQMVSKGFL

SEQ ID NO: 23875 - protein, 10 aa, synthetic construct
QTKKQVGNIV

SEQ ID NO: 23876 - protein, 9 aa, synthetic construct
PSPYRLLLL

SEQ ID NO: 23877 - protein, 8 aa, synthetic construct
TQLIGNLK

SEQ ID NO: 23878 - protein, 9 aa, synthetic construct
ASALAGFLY

SEQ ID NO: 23879 - protein, 11 aa, synthetic construct
QTLLHFIMDSY

SEQ ID NO: 23880 - protein, 9 aa, synthetic construct
QTLLMNQLT

SEQ ID NO: 23881 - protein, 10 aa, synthetic construct
QVLLVDGKGV

SEQ ID NO: 23882 - protein, 9 aa, synthetic construct
VYRNLFIQV

SEQ ID NO: 23883 - protein, 9 aa, synthetic construct
ARISGISFI

SEQ ID NO: 23884 - protein, 8 aa, synthetic construct
QTSILSSL

SEQ ID NO: 23885 - protein, 8 aa, synthetic construct
KEAILKLI

SEQ ID NO: 23886 - protein, 9 aa, synthetic construct
SAAVVLSRI

SEQ ID NO: 23887 - protein, 10 aa, synthetic construct
SSLAFFNSCL

SEQ ID NO: 23888 - protein, 10 aa, synthetic construct
YSAAFLLKET

SEQ ID NO: 23889 - protein, 9 aa, synthetic construct
SAFSLPLIS

SEQ ID NO: 23890 - protein, 9 aa, synthetic construct
QTPPPLFRT

SEQ ID NO: 23891 - protein, 12 aa, synthetic construct
TAGRQIASGPVA

SEQ ID NO: 23892 - protein, 9 aa, synthetic construct
LTETQHRSM

SEQ ID NO: 23893 - protein, 9 aa, synthetic construct
GRFCTFISM

SEQ ID NO: 23894 - protein, 8 aa, synthetic construct
TQILRNML

SEQ ID NO: 23895 - protein, 9 aa, synthetic construct
TQEESPIEV

SEQ ID NO: 23896 - protein, 9 aa, synthetic construct
TQPHPLEAL

SEQ ID NO: 23897 - protein, 9 aa, synthetic construct
TYSAATFSV

SEQ ID NO: 23898 - protein, 10 aa, synthetic construct
AGFIAPLFTV

SEQ ID NO: 23899 - protein, 10 aa, synthetic construct
ALAWSLGLRL

SEQ ID NO: 23900 - protein, 10 aa, synthetic construct
GMPGHTHTMI

SEQ ID NO: 23901 - protein, 10 aa, synthetic construct
AGSFRVPLYL

SEQ ID NO: 23902 - protein, 9 aa, synthetic construct
LNPMRVLLK

SEQ ID NO: 23903 - protein, 12 aa, synthetic construct
PPGAESGPQTKF

SEQ ID NO: 23904 - protein, 9 aa, synthetic construct
LFNIPPLEI

SEQ ID NO: 23905 - protein, 10 aa, synthetic construct
HSLLLRMSSL

SEQ ID NO: 23906 - protein, 9 aa, synthetic construct
EFNLSRMKF

SEQ ID NO: 23907 - protein, 9 aa, synthetic construct
SLGGVPVRL

SEQ ID NO: 23908 - protein, 9 aa, synthetic construct
LGSIRPVGV

SEQ ID NO: 23909 - protein, 9 aa, synthetic construct
FHTRGAVAL

SEQ ID NO: 23910 - protein, 10 aa, synthetic construct
FIKNKFSPKQ

SEQ ID NO: 23911 - protein, 9 aa, synthetic construct
DRTINLLEV

SEQ ID NO: 23912 - protein, 8 aa, synthetic construct
RLTPKIQK

SEQ ID NO: 23913 - protein, 9 aa, synthetic construct
RLTPKIQKL

SEQ ID NO: 23914 - protein, 9 aa, synthetic construct
LQQLILQQI

SEQ ID NO: 23915 - protein, 10 aa, synthetic construct
LRAALAIQQL

SEQ ID NO: 23916 - protein, 9 aa, synthetic construct
VKKELPQKI

SEQ ID NO: 23917 - protein, 10 aa, synthetic construct
VTGALKLFLR

SEQ ID NO: 23918 - protein, 9 aa, synthetic construct
YNQKLQQQL

SEQ ID NO: 23919 - protein, 9 aa, synthetic construct
QKKGVFIRF

SEQ ID NO: 23920 - protein, 9 aa, synthetic construct
FFLPKTITR

SEQ ID NO: 23921 - protein, 9 aa, synthetic construct
TMKLITIRF

SEQ ID NO: 23922 - protein, 8 aa, synthetic construct
IWKLFLRF

SEQ ID NO: 23923 - protein, 10 aa, synthetic construct
AGPVHLFTTY

SEQ ID NO: 23924 - protein, 10 aa, synthetic construct
GRTSTPVNMI

SEQ ID NO: 23925 - protein, 9 aa, synthetic construct
PRHWDGMYM

SEQ ID NO: 23926 - protein, 9 aa, synthetic construct
FSQRVHLRL

SEQ ID NO: 23927 - protein, 10 aa, synthetic construct
ITVIPGLKTI

SEQ ID NO: 23928 - protein, 9 aa, synthetic construct
HSPPLRFAL

SEQ ID NO: 23929 - protein, 9 aa, synthetic construct
AFWALVQLL

SEQ ID NO: 23930 - protein, 9 aa, synthetic construct
LLRTASLHL

SEQ ID NO: 23931 - protein, 10 aa, synthetic construct
GLTYALVQMQ

SEQ ID NO: 23932 - protein, 10 aa, synthetic construct
YGEGGRILEI

SEQ ID NO: 23933 - protein, 10 aa, synthetic construct
FASVAPLLEF

SEQ ID NO: 23934 - protein, 9 aa, synthetic construct
LLKGEYVGK

SEQ ID NO: 23935 - protein, 9 aa, synthetic construct
SLRKAKKKP

SEQ ID NO: 23936 - protein, 9 aa, synthetic construct
AVTKRVLRL

SEQ ID NO: 23937 - protein, 10 aa, synthetic construct
KVVSALGRLL

SEQ ID NO: 23938 - protein, 9 aa, synthetic construct
HISIMFYII

SEQ ID NO: 23939 - protein, 10 aa, synthetic construct
FHEHAEVVFT

SEQ ID NO: 23940 - protein, 10 aa, synthetic construct
CSASHRLHTF

SEQ ID NO: 23941 - protein, 10 aa, synthetic construct
EHGKDLEIMQ

SEQ ID NO: 23942 - protein, 11 aa, synthetic construct
LSHPVCLGLPL

SEQ ID NO: 23943 - protein, 9 aa, synthetic construct
MVLFTPNIY

SEQ ID NO: 23944 - protein, 9 aa, synthetic construct
DNPHLKNLY

SEQ ID NO: 23945 - protein, 10 aa, synthetic construct
TSAALDARGL

SEQ ID NO: 23946 - protein, 10 aa, synthetic construct
TTGLPKAAVI

SEQ ID NO: 23947 - protein, 9 aa, synthetic construct
TSCLCVSFL

SEQ ID NO: 23948 - protein, 9 aa, synthetic construct
DLYSCTSIY

SEQ ID NO: 23949 - protein, 10 aa, synthetic construct
TEDSLGGFAY

SEQ ID NO: 23950 - protein, 8 aa, synthetic construct
AEVLCLEY

SEQ ID NO: 23951 - protein, 9 aa, synthetic construct
CSQGITTEY

SEQ ID NO: 23952 - protein, 8 aa, synthetic construct
MRDDTIYE

SEQ ID NO: 23953 - protein, 9 aa, synthetic construct
STLDQIYST

SEQ ID NO: 23954 - protein, 8 aa, synthetic construct
FCPSFIFV

SEQ ID NO: 23955 - protein, 9 aa, synthetic construct
SSDTSYIDY

SEQ ID NO: 23956 - protein, 10 aa, synthetic construct
SDENLTDAEG

SEQ ID NO: 23957 - protein, 7 aa, synthetic construct
TMHFYYY

SEQ ID NO: 23958 - protein, 10 aa, synthetic construct
EPLTNLIHST

SEQ ID NO: 23959 - protein, 12 aa, synthetic construct
TSETPWNTAIPL

SEQ ID NO: 23960 - protein, 10 aa, synthetic construct
TSLIMSLVSE

SEQ ID NO: 23961 - protein, 8 aa, synthetic construct
TSFIRHWR

SEQ ID NO: 23962 - protein, 9 aa, synthetic construct
MNLGETLTY

SEQ ID NO: 23963 - protein, 8 aa, synthetic construct
TLYKSKVI

SEQ ID NO: 23964 - protein, 11 aa, synthetic construct
ITSDSMMKNFF

SEQ ID NO: 23965 - protein, 10 aa, synthetic construct
MGLSFSSGQK

SEQ ID NO: 23966 - protein, 9 aa, synthetic construct
TSNNPLESF

SEQ ID NO: 23967 - protein, 10 aa, synthetic construct
AIANSTASTL

SEQ ID NO: 23968 - protein, 8 aa, synthetic construct
STIPAEEL

SEQ ID NO: 23969 - protein, 9 aa, synthetic construct
LGEDIVITA

SEQ ID NO: 23970 - protein, 8 aa, synthetic construct
VLPKASTL

SEQ ID NO: 23971 - protein, 10 aa, synthetic construct
TSPGGISLTI

SEQ ID NO: 23972 - protein, 10 aa, synthetic construct
IAEGQRSATS

SEQ ID NO: 23973 - protein, 8 aa, synthetic construct
VSTPTLVY

SEQ ID NO: 23974 - protein, 9 aa, synthetic construct
LSSPINSTL

SEQ ID NO: 23975 - protein, 8 aa, synthetic construct
CVMLLLCY

SEQ ID NO: 23976 - protein, 11 aa, synthetic construct
STESLLGSTSI

SEQ ID NO: 23977 - protein, 12 aa, synthetic construct
GREADGVHLAGE

SEQ ID NO: 23978 - protein, 11 aa, synthetic construct
TDLHAHFLADA

SEQ ID NO: 23979 - protein, 9 aa, synthetic construct
YRDLKPGTS

SEQ ID NO: 23980 - protein, 9 aa, synthetic construct
SSLPTSLTI

SEQ ID NO: 23981 - protein, 8 aa, synthetic construct
SEDKILTI

SEQ ID NO: 23982 - protein, 9 aa, synthetic construct
SSLTSDTLY

SEQ ID NO: 23983 - protein, 9 aa, synthetic construct
VTTTPIVTT

SEQ ID NO: 23984 - protein, 9 aa, synthetic construct
TSTLSTPLL

SEQ ID NO: 23985 - protein, 9 aa, synthetic construct
EGFTELLPI

SEQ ID NO: 23986 - protein, 9 aa, synthetic construct
IPDDATTLY

SEQ ID NO: 23987 - protein, 11 aa, synthetic construct
HHGDLLSLGLY

SEQ ID NO: 23988 - protein, 13 aa, synthetic construct
ESTIQGGELGAPE

SEQ ID NO: 23989 - protein, 8 aa, synthetic construct
TTDNGQIL

SEQ ID NO: 23990 - protein, 9 aa, synthetic construct
LTTDNANIL

SEQ ID NO: 23991 - protein, 9 aa, synthetic construct
CRGEGGILI

SEQ ID NO: 23992 - protein, 9 aa, synthetic construct
SQSEQGLLL

SEQ ID NO: 23993 - protein, 9 aa, synthetic construct
VSEESSISY

SEQ ID NO: 23994 - protein, 10 aa, synthetic construct
TTQGFLTSAY

SEQ ID NO: 23995 - protein, 10 aa, synthetic construct
QPAEAAPELY

SEQ ID NO: 23996 - protein, 9 aa, synthetic construct
DQVTISEIY

SEQ ID NO: 23997 - protein, 8 aa, synthetic construct
TITHGLYK

SEQ ID NO: 23998 - protein, 9 aa, synthetic construct
STLAMDTTG

SEQ ID NO: 23999 - protein, 11 aa, synthetic construct
ANTKGNENANG

SEQ ID NO: 24000 - protein, 11 aa, synthetic construct
APPSDLRALSP

SEQ ID NO: 24001 - protein, 10 aa, synthetic construct
IRGHSWLASP

SEQ ID NO: 24002 - protein, 10 aa, synthetic construct
SDGGVFCLSF

SEQ ID NO: 24003 - protein, 9 aa, synthetic construct
KLCASILSP

SEQ ID NO: 24004 - protein, 9 aa, synthetic construct
TTIVPDFFV

SEQ ID NO: 24005 - protein, 9 aa, synthetic construct
LTTPIQTAA

SEQ ID NO: 24006 - protein, 13 aa, synthetic construct
TTVPLALPPGGNG

SEQ ID NO: 24007 - protein, 12 aa, synthetic construct
LSSSHAVVLPPS

SEQ ID NO: 24008 - protein, 11 aa, synthetic construct
TLLSSHRVPSP

SEQ ID NO: 24009 - protein, 9 aa, synthetic construct
LGEVQPLPL

SEQ ID NO: 24010 - protein, 11 aa, synthetic construct
VTLPPVSGAPS

SEQ ID NO: 24011 - protein, 9 aa, synthetic construct
PQNGTIKLY

SEQ ID NO: 24012 - protein, 9 aa, synthetic construct
DPPTLNGIT

SEQ ID NO: 24013 - protein, 9 aa, synthetic construct
TTVDRNRKV

SEQ ID NO: 24014 - protein, 10 aa, synthetic construct
HPLATPPVPS

SEQ ID NO: 24015 - protein, 9 aa, synthetic construct
YTTDNFVLF

SEQ ID NO: 24016 - protein, 14 aa, synthetic construct
SGAEFAGGDGAARG

SEQ ID NO: 24017 - protein, 8 aa, synthetic construct
GDKVVVTY

SEQ ID NO: 24018 - protein, 8 aa, synthetic construct
TVGDNRTY

SEQ ID NO: 24019 - protein, 10 aa, synthetic construct
ITNLKKIFSL

SEQ ID NO: 24020 - protein, 9 aa, synthetic construct
ATPVFNPTV

SEQ ID NO: 24021 - protein, 9 aa, synthetic construct
ASLTVAEQY

SEQ ID NO: 24022 - protein, 9 aa, synthetic construct
TVVAVPKVA

SEQ ID NO: 24023 - protein, 8 aa, synthetic construct
IEKPIGKV

SEQ ID NO: 24024 - protein, 10 aa, synthetic construct
TGLILKAIPA

SEQ ID NO: 24025 - protein, 9 aa, synthetic construct
TGLVVIFSY

SEQ ID NO: 24026 - protein, 11 aa, synthetic construct
TVCGDPRVAAD

SEQ ID NO: 24027 - protein, 9 aa, synthetic construct
HDDLWSLFY

SEQ ID NO: 24028 - protein, 9 aa, synthetic construct
TVLAYHAPE

SEQ ID NO: 24029 - protein, 9 aa, synthetic construct
SIFDLDEYL

SEQ ID NO: 24030 - protein, 9 aa, synthetic construct
MLSLEFDYM

SEQ ID NO: 24031 - protein, 9 aa, synthetic construct
ISFEHVCKP

SEQ ID NO: 24032 - protein, 10 aa, synthetic construct
LSLGLFSLGY

SEQ ID NO: 24033 - protein, 11 aa, synthetic construct
AKFAAGSVVSF

SEQ ID NO: 24034 - protein, 9 aa, synthetic construct
PGPFHSKVT

SEQ ID NO: 24035 - protein, 8 aa, synthetic construct
TVGNLRLL

SEQ ID NO: 24036 - protein, 9 aa, synthetic construct
VHGTVQATF

SEQ ID NO: 24037 - protein, 9 aa, synthetic construct
LSHSVTFKP

SEQ ID NO: 24038 - protein, 9 aa, synthetic construct
ILDQSLILM

SEQ ID NO: 24039 - protein, 11 aa, synthetic construct
VTLEAVLHSGF

SEQ ID NO: 24040 - protein, 9 aa, synthetic construct
SIIENLAIF

SEQ ID NO: 24041 - protein, 9 aa, synthetic construct
VTLHREFPA

SEQ ID NO: 24042 - protein, 9 aa, synthetic construct
LYALLKLSL

SEQ ID NO: 24043 - protein, 11 aa, synthetic construct
SLLPGGSEGGR

SEQ ID NO: 24044 - protein, 10 aa, synthetic construct
VTLILSPPVP

SEQ ID NO: 24045 - protein, 9 aa, synthetic construct
VITEVTTMT

SEQ ID NO: 24046 - protein, 9 aa, synthetic construct
LSLGTQITY

SEQ ID NO: 24047 - protein, 9 aa, synthetic construct
ISLIDKPAI

SEQ ID NO: 24048 - protein, 9 aa, synthetic construct
TVLYIHISL

SEQ ID NO: 24049 - protein, 9 aa, synthetic construct
LSLKYKQSF

SEQ ID NO: 24050 - protein, 9 aa, synthetic construct
THKALLVAL

SEQ ID NO: 24051 - protein, 9 aa, synthetic construct
SLLALSQAL

SEQ ID NO: 24052 - protein, 9 aa, synthetic construct
IDSLALDYL

SEQ ID NO: 24053 - protein, 9 aa, synthetic construct
ALLDSLVVL

SEQ ID NO: 24054 - protein, 9 aa, synthetic construct
LSLQDLIEK

SEQ ID NO: 24055 - protein, 9 aa, synthetic construct
LSLELLSYQ

SEQ ID NO: 24056 - protein, 10 aa, synthetic construct
SLLGQRAPSP

SEQ ID NO: 24057 - protein, 9 aa, synthetic construct
SILYGTVGI

SEQ ID NO: 24058 - protein, 9 aa, synthetic construct
IQFPSIIIY

SEQ ID NO: 24059 - protein, 10 aa, synthetic construct
LSLESGFPAF

SEQ ID NO: 24060 - protein, 9 aa, synthetic construct
ISIFPVSLS

SEQ ID NO: 24061 - protein, 10 aa, synthetic construct
LGSIARPLSL

SEQ ID NO: 24062 - protein, 9 aa, synthetic construct
TVLDLGMVL

SEQ ID NO: 24063 - protein, 9 aa, synthetic construct
LSISARNSL

SEQ ID NO: 24064 - protein, 9 aa, synthetic construct
KNATMPVTM

SEQ ID NO: 24065 - protein, 8 aa, synthetic construct
LSLVHLAR

SEQ ID NO: 24066 - protein, 8 aa, synthetic construct
TVLHRAVI

SEQ ID NO: 24067 - protein, 9 aa, synthetic construct
DLVMVAEYF

SEQ ID NO: 24068 - protein, 12 aa, synthetic construct
SLLMAVLVLSYK

SEQ ID NO: 24069 - protein, 10 aa, synthetic construct
LSNMLRDDGG

SEQ ID NO: 24070 - protein, 8 aa, synthetic construct
WQHLHPSL

SEQ ID NO: 24071 - protein, 9 aa, synthetic construct
SNISHYLVT

SEQ ID NO: 24072 - protein, 9 aa, synthetic construct
LSPAAYSSL

SEQ ID NO: 24073 - protein, 9 aa, synthetic construct
ISLMTLDSL

SEQ ID NO: 24074 - protein, 9 aa, synthetic construct
ISFPTDTVI

SEQ ID NO: 24075 - protein, 8 aa, synthetic construct
SLHPVFSK

SEQ ID NO: 24076 - protein, 9 aa, synthetic construct
SLPLSPAQL

SEQ ID NO: 24077 - protein, 9 aa, synthetic construct
LSLYNITLK

SEQ ID NO: 24078 - protein, 9 aa, synthetic construct
KVRTIIIRS

SEQ ID NO: 24079 - protein, 9 aa, synthetic construct
SLRQEGAML

SEQ ID NO: 24080 - protein, 8 aa, synthetic construct
TVSHKFRY

SEQ ID NO: 24081 - protein, 11 aa, synthetic construct
VTISDLKIQAV

SEQ ID NO: 24082 - protein, 9 aa, synthetic construct
VTVSSENAF

SEQ ID NO: 24083 - protein, 9 aa, synthetic construct
LSTKVPLKT

SEQ ID NO: 24084 - protein, 9 aa, synthetic construct
TVKEVGLLK

SEQ ID NO: 24085 - protein, 9 aa, synthetic construct
VSSVVALTF

SEQ ID NO: 24086 - protein, 9 aa, synthetic construct
VTEMGVSLY

SEQ ID NO: 24087 - protein, 11 aa, synthetic construct
SPMSISSALAM

SEQ ID NO: 24088 - protein, 9 aa, synthetic construct
SLDLLTKLY

SEQ ID NO: 24089 - protein, 10 aa, synthetic construct
SPSDVVTPIV

SEQ ID NO: 24090 - protein, 9 aa, synthetic construct
ITSVTATVY

SEQ ID NO: 24091 - protein, 9 aa, synthetic construct
AEIQTRLAY

SEQ ID NO: 24092 - protein, 12 aa, synthetic construct
VALDGGSMLVTY

SEQ ID NO: 24093 - protein, 9 aa, synthetic construct
ISDYAFLGT

SEQ ID NO: 24094 - protein, 9 aa, synthetic construct
FGSVSLMYL

SEQ ID NO: 24095 - protein, 10 aa, synthetic construct
SYFGSVLCSV

SEQ ID NO: 24096 - protein, 9 aa, synthetic construct
VTLVPYWMV

SEQ ID NO: 24097 - protein, 9 aa, synthetic construct
LVFSSPYLA

SEQ ID NO: 24098 - protein, 9 aa, synthetic construct
DFASYLLAI

SEQ ID NO: 24099 - protein, 9 aa, synthetic construct
YMIEAEISF

SEQ ID NO: 24100 - protein, 9 aa, synthetic construct
TVMGARTLL

SEQ ID NO: 24101 - protein, 9 aa, synthetic construct
ISMTLRTRY

SEQ ID NO: 24102 - protein, 11 aa, synthetic construct
LSMGLNGTMGP

SEQ ID NO: 24103 - protein, 9 aa, synthetic construct
WEFTDGATF

SEQ ID NO: 24104 - protein, 9 aa, synthetic construct
ATNFLLEMT

SEQ ID NO: 24105 - protein, 10 aa, synthetic construct
SSVYSPESNV

SEQ ID NO: 24106 - protein, 9 aa, synthetic construct
SSFDLDYDF

SEQ ID NO: 24107 - protein, 9 aa, synthetic construct
FMDAPPMET

SEQ ID NO: 24108 - protein, 10 aa, synthetic construct
TYGTLHLQNS

SEQ ID NO: 24109 - protein, 8 aa, synthetic construct
AVYDFPQF

SEQ ID NO: 24110 - protein, 11 aa, synthetic construct
TYIHALNNGLF

SEQ ID NO: 24111 - protein, 11 aa, synthetic construct
RATGEDENILF

SEQ ID NO: 24112 - protein, 10 aa, synthetic construct
SAVFSSPVFF

SEQ ID NO: 24113 - protein, 11 aa, synthetic construct
TYLSSKSQPSA

SEQ ID NO: 24114 - protein, 10 aa, synthetic construct
TYLDHSTQKP

SEQ ID NO: 24115 - protein, 9 aa, synthetic construct
LSEYLIPIV

SEQ ID NO: 24116 - protein, 9 aa, synthetic construct
YTKEAILKL

SEQ ID NO: 24117 - protein, 8 aa, synthetic construct
TYEIVLWQ

SEQ ID NO: 24118 - protein, 9 aa, synthetic construct
ITYYTPQLL

SEQ ID NO: 24119 - protein, 9 aa, synthetic construct
TYPTLSIPL

SEQ ID NO: 24120 - protein, 9 aa, synthetic construct
TYISIHLTV

SEQ ID NO: 24121 - protein, 10 aa, synthetic construct
PDAKELEAIF

SEQ ID NO: 24122 - protein, 10 aa, synthetic construct
TFSGPLRPFF

SEQ ID NO: 24123 - protein, 10 aa, synthetic construct
TYPEVPPEKL

SEQ ID NO: 24124 - protein, 10 aa, synthetic construct
YTQDLGAFAK

SEQ ID NO: 24125 - protein, 10 aa, synthetic construct
YLFNTTFGLL

SEQ ID NO: 24126 - protein, 11 aa, synthetic construct
FAGFNLLSCTL

SEQ ID NO: 24127 - protein, 11 aa, synthetic construct
EGPRVGVGVVY

SEQ ID NO: 24128 - protein, 9 aa, synthetic construct
YTDRVFTFI

SEQ ID NO: 24129 - protein, 11 aa, synthetic construct
MTLFPGRGSLG

SEQ ID NO: 24130 - protein, 10 aa, synthetic construct
QKSNGVLPEL

SEQ ID NO: 24131 - protein, 8 aa, synthetic construct
TYVWKIFS

SEQ ID NO: 24132 - protein, 9 aa, synthetic construct
TSYILLPLE

SEQ ID NO: 24133 - protein, 9 aa, synthetic construct
ETFVTYYNL

SEQ ID NO: 24134 - protein, 8 aa, synthetic construct
YTYRRMGF

SEQ ID NO: 24135 - protein, 9 aa, synthetic construct
MTAQDLVSL

SEQ ID NO: 24136 - protein, 9 aa, synthetic construct
MTDLTNNKV

SEQ ID NO: 24137 - protein, 9 aa, synthetic construct
ATMIGEIAA

SEQ ID NO: 24138 - protein, 8 aa, synthetic construct
VDFTADKY

SEQ ID NO: 24139 - protein, 9 aa, synthetic construct
MTPDSIIDV

SEQ ID NO: 24140 - protein, 8 aa, synthetic construct
EMKHLVTM

SEQ ID NO: 24141 - protein, 8 aa, synthetic construct
TMLPSMLL

SEQ ID NO: 24142 - protein, 8 aa, synthetic construct
PVTMVPSV

SEQ ID NO: 24143 - protein, 8 aa, synthetic construct
SPYLVSLW

SEQ ID NO: 24144 - protein, 9 aa, synthetic construct
ALFDKAAVF

SEQ ID NO: 24145 - protein, 10 aa, synthetic construct
SLEIQARDLA

SEQ ID NO: 24146 - protein, 10 aa, synthetic construct
DITIQEGRLA

SEQ ID NO: 24147 - protein, 9 aa, synthetic construct
YVAAFTVSS

SEQ ID NO: 24148 - protein, 9 aa, synthetic construct
PVAALFELY

SEQ ID NO: 24149 - protein, 10 aa, synthetic construct
GGLAAAKEAA

SEQ ID NO: 24150 - protein, 8 aa, synthetic construct
AQLQVQTA

SEQ ID NO: 24151 - protein, 11 aa, synthetic construct
AVAAAGLGTGA

SEQ ID NO: 24152 - protein, 9 aa, synthetic construct
LGLVIGAIY

SEQ ID NO: 24153 - protein, 10 aa, synthetic construct
QMAPSAAPQA

SEQ ID NO: 24154 - protein, 10 aa, synthetic construct
VAEDVAMAFS

SEQ ID NO: 24155 - protein, 8 aa, synthetic construct
INYEAFVK

SEQ ID NO: 24156 - protein, 9 aa, synthetic construct
DVHIKGIMY

SEQ ID NO: 24157 - protein, 10 aa, synthetic construct
VLMAATHAVY

SEQ ID NO: 24158 - protein, 10 aa, synthetic construct
VGESRQMVAV

SEQ ID NO: 24159 - protein, 9 aa, synthetic construct
GEVIDLSNY

SEQ ID NO: 24160 - protein, 9 aa, synthetic construct
GIDDLPAVL

SEQ ID NO: 24161 - protein, 9 aa, synthetic construct
GDLMVLVPF

SEQ ID NO: 24162 - protein, 10 aa, synthetic construct
DSGAKSVVLM

SEQ ID NO: 24163 - protein, 9 aa, synthetic construct
LSMETTATF

SEQ ID NO: 24164 - protein, 11 aa, synthetic construct
VAGTLVMTEAV

SEQ ID NO: 24165 - protein, 9 aa, synthetic construct
LGFPGLNGF

SEQ ID NO: 24166 - protein, 9 aa, synthetic construct
VADVDSWTL

SEQ ID NO: 24167 - protein, 8 aa, synthetic construct
VLQDMGAA

SEQ ID NO: 24168 - protein, 9 aa, synthetic construct
FNNAGVGAA

SEQ ID NO: 24169 - protein, 9 aa, synthetic construct
GLMGVEGAA

SEQ ID NO: 24170 - protein, 7 aa, synthetic construct
QRMEVAA

SEQ ID NO: 24171 - protein, 9 aa, synthetic construct
VMNGSLGAA

SEQ ID NO: 24172 - protein, 9 aa, synthetic construct
MAATAVGAA

SEQ ID NO: 24173 - protein, 9 aa, synthetic construct
GLGKTIQAI

SEQ ID NO: 24174 - protein, 9 aa, synthetic construct
VLGIIIKNF

SEQ ID NO: 24175 - protein, 8 aa, synthetic construct
LGLEFRDI

SEQ ID NO: 24176 - protein, 8 aa, synthetic construct
VAEIDFRL

SEQ ID NO: 24177 - protein, 9 aa, synthetic construct
LGLNGMEYL

SEQ ID NO: 24178 - protein, 10 aa, synthetic construct
LGLHQVLQDL

SEQ ID NO: 24179 - protein, 9 aa, synthetic construct
VLLADINDF

SEQ ID NO: 24180 - protein, 9 aa, synthetic construct
IGIPGVKME

SEQ ID NO: 24181 - protein, 9 aa, synthetic construct
GLIPLVNSM

SEQ ID NO: 24182 - protein, 9 aa, synthetic construct
IGIDFGHAF

SEQ ID NO: 24183 - protein, 9 aa, synthetic construct
LGLLMIVVL

SEQ ID NO: 24184 - protein, 9 aa, synthetic construct
IIGMLVLLL

SEQ ID NO: 24185 - protein, 10 aa, synthetic construct
TGPSAAASFF

SEQ ID NO: 24186 - protein, 9 aa, synthetic construct
VNRQGILTI

SEQ ID NO: 24187 - protein, 9 aa, synthetic construct
GLQSPGNIF

SEQ ID NO: 24188 - protein, 9 aa, synthetic construct
VNGLLSLAL

SEQ ID NO: 24189 - protein, 8 aa, synthetic construct
VAGAPITL

SEQ ID NO: 24190 - protein, 7 aa, synthetic construct
LGQPVTL

SEQ ID NO: 24191 - protein, 9 aa, synthetic construct
IGPGAYVYL

SEQ ID NO: 24192 - protein, 10 aa, synthetic construct
VGEMKGAIGL

SEQ ID NO: 24193 - protein, 10 aa, synthetic construct
SASKMAPLAV

SEQ ID NO: 24194 - protein, 9 aa, synthetic construct
LTMTQNIAV

SEQ ID NO: 24195 - protein, 10 aa, synthetic construct
VAPDEHPILL

SEQ ID NO: 24196 - protein, 11 aa, synthetic construct
VAPDEHPILLT

SEQ ID NO: 24197 - protein, 11 aa, synthetic construct
RNKMNGTLTAV

SEQ ID NO: 24198 - protein, 11 aa, synthetic construct
TISSREIQTAV

SEQ ID NO: 24199 - protein, 10 aa, synthetic construct
TPTPCPPQPL

SEQ ID NO: 24200 - protein, 8 aa, synthetic construct
AVDCKWYI

SEQ ID NO: 24201 - protein, 9 aa, synthetic construct
AVAGPFSAL

SEQ ID NO: 24202 - protein, 12 aa, synthetic construct
VLTGSGLVNIGL

SEQ ID NO: 24203 - protein, 11 aa, synthetic construct
VALEAELALTL

SEQ ID NO: 24204 - protein, 11 aa, synthetic construct
GIGQRKGRGTL

SEQ ID NO: 24205 - protein, 12 aa, synthetic construct
VNSIIGSGIIGL

SEQ ID NO: 24206 - protein, 10 aa, synthetic construct
VAVDNLRRSI

SEQ ID NO: 24207 - protein, 11 aa, synthetic construct
TKAQILEGLGI

SEQ ID NO: 24208 - protein, 9 aa, synthetic construct
LGIGPVLGL

SEQ ID NO: 24209 - protein, 9 aa, synthetic construct
VAPVAPVAV

SEQ ID NO: 24210 - protein, 10 aa, synthetic construct
QMLRNPAIAV

SEQ ID NO: 24211 - protein, 9 aa, synthetic construct
VATPAAQCL

SEQ ID NO: 24212 - protein, 9 aa, synthetic construct
LGPGTLGLD

SEQ ID NO: 24213 - protein, 9 aa, synthetic construct
TVIFHDVAV

SEQ ID NO: 24214 - protein, 10 aa, synthetic construct
GLPPEAAEGP

SEQ ID NO: 24215 - protein, 9 aa, synthetic construct
VANPVPASL

SEQ ID NO: 24216 - protein, 8 aa, synthetic construct
VAPQVPAL

SEQ ID NO: 24217 - protein, 10 aa, synthetic construct
VAASQAALGL

SEQ ID NO: 24218 - protein, 10 aa, synthetic construct
AVGDSPLAAL

SEQ ID NO: 24219 - protein, 8 aa, synthetic construct
LNPGSLAV

SEQ ID NO: 24220 - protein, 8 aa, synthetic construct
VAPYQTLL

SEQ ID NO: 24221 - protein, 9 aa, synthetic construct
AVTPSPAGL

SEQ ID NO: 24222 - protein, 9 aa, synthetic construct
LGPVDMLVN

SEQ ID NO: 24223 - protein, 10 aa, synthetic construct
VAGLDAGLVY

SEQ ID NO: 24224 - protein, 8 aa, synthetic construct
KDHYVQAV

SEQ ID NO: 24225 - protein, 9 aa, synthetic construct
VAQADWAAK

SEQ ID NO: 24226 - protein, 9 aa, synthetic construct
AVEKARTLY

SEQ ID NO: 24227 - protein, 10 aa, synthetic construct
QPGKVAGVEM

SEQ ID NO: 24228 - protein, 9 aa, synthetic construct
RVALDAVAL

SEQ ID NO: 24229 - protein, 7 aa, synthetic construct
VWERLGL

SEQ ID NO: 24230 - protein, 8 aa, synthetic construct
IMQGLLVM

SEQ ID NO: 24231 - protein, 8 aa, synthetic construct
IYTPNVVM

SEQ ID NO: 24232 - protein, 8 aa, synthetic construct
WTSSLLVM

SEQ ID NO: 24233 - protein, 8 aa, synthetic construct
SKELDYLI

SEQ ID NO: 24234 - protein, 9 aa, synthetic construct
FDFATVSLL

SEQ ID NO: 24235 - protein, 9 aa, synthetic construct
VALSGISTL

SEQ ID NO: 24236 - protein, 9 aa, synthetic construct
GIVSTPVPK

SEQ ID NO: 24237 - protein, 9 aa, synthetic construct
LLDGVVTMT

SEQ ID NO: 24238 - protein, 8 aa, synthetic construct
LGFRRSMN

SEQ ID NO: 24239 - protein, 9 aa, synthetic construct
AVSPIAKYY

SEQ ID NO: 24240 - protein, 8 aa, synthetic construct
VGIPLGKV

SEQ ID NO: 24241 - protein, 9 aa, synthetic construct
LGIPLNVIF

SEQ ID NO: 24242 - protein, 9 aa, synthetic construct
RAEDILPTY

SEQ ID NO: 24243 - protein, 8 aa, synthetic construct
VSVTMPSL

SEQ ID NO: 24244 - protein, 8 aa, synthetic construct
AFTDVPSI

SEQ ID NO: 24245 - protein, 11 aa, synthetic construct
VAQAEAAGAAF

SEQ ID NO: 24246 - protein, 9 aa, synthetic construct
FGKYIDIYF

SEQ ID NO: 24247 - protein, 9 aa, synthetic construct
YPCAILYGL

SEQ ID NO: 24248 - protein, 9 aa, synthetic construct
MALMNTLLY

SEQ ID NO: 24249 - protein, 9 aa, synthetic construct
LCPAYGLYL

SEQ ID NO: 24250 - protein, 9 aa, synthetic construct
AVYSGSIVL

SEQ ID NO: 24251 - protein, 9 aa, synthetic construct
VSVSVFSAL

SEQ ID NO: 24252 - protein, 9 aa, synthetic construct
AVMKQFAFV

SEQ ID NO: 24253 - protein, 8 aa, synthetic construct
VQRQMLGL

SEQ ID NO: 24254 - protein, 9 aa, synthetic construct
MQNKSVFIL

SEQ ID NO: 24255 - protein, 9 aa, synthetic construct
VPFRGDYLL

SEQ ID NO: 24256 - protein, 9 aa, synthetic construct
MEEAPAAGV

SEQ ID NO: 24257 - protein, 13 aa, synthetic construct
GAVQNSFSEQSAG

SEQ ID NO: 24258 - protein, 12 aa, synthetic construct
VDESVSVTESTE

SEQ ID NO: 24259 - protein, 8 aa, synthetic construct
VDSRWSSY

SEQ ID NO: 24260 - protein, 10 aa, synthetic construct
VIQNLDELEF

SEQ ID NO: 24261 - protein, 10 aa, synthetic construct
LDVMPNISDV

SEQ ID NO: 24262 - protein, 10 aa, synthetic construct
VVETMCPVPA

SEQ ID NO: 24263 - protein, 10 aa, synthetic construct
FGHVKEGMDV

SEQ ID NO: 24264 - protein, 9 aa, synthetic construct
RLPEDVLLK

SEQ ID NO: 24265 - protein, 11 aa, synthetic construct
VDPNKQNLIAE

SEQ ID NO: 24266 - protein, 10 aa, synthetic construct
VDPIAGRDGV

SEQ ID NO: 24267 - protein, 8 aa, synthetic construct
VSMLDAIP

SEQ ID NO: 24268 - protein, 8 aa, synthetic construct
VILSDMAP

SEQ ID NO: 24269 - protein, 9 aa, synthetic construct
ELATKKPLF

SEQ ID NO: 24270 - protein, 9 aa, synthetic construct
EAVELDAVL

SEQ ID NO: 24271 - protein, 8 aa, synthetic construct
ALENDLAL

SEQ ID NO: 24272 - protein, 9 aa, synthetic construct
ALVEPLGLE

SEQ ID NO: 24273 - protein, 10 aa, synthetic construct
LAETVFGTVK

SEQ ID NO: 24274 - protein, 10 aa, synthetic construct
VESLNSLIND

SEQ ID NO: 24275 - protein, 13 aa, synthetic construct
GPGTVRGVNAAGG

SEQ ID NO: 24276 - protein, 10 aa, synthetic construct
LDSEVVWPAP

SEQ ID NO: 24277 - protein, 10 aa, synthetic construct
DGEYIVAGSA

SEQ ID NO: 24278 - protein, 9 aa, synthetic construct
NFTDFDLEP

SEQ ID NO: 24279 - protein, 8 aa, synthetic construct
DIFEDYIY

SEQ ID NO: 24280 - protein, 10 aa, synthetic construct
VMMGGGSVLQ

SEQ ID NO: 24281 - protein, 10 aa, synthetic construct
EVEFCGYTTT

SEQ ID NO: 24282 - protein, 9 aa, synthetic construct
EEFINDISG

SEQ ID NO: 24283 - protein, 8 aa, synthetic construct
EVFQMVEN

SEQ ID NO: 24284 - protein, 8 aa, synthetic construct
NFVMRCNL

SEQ ID NO: 24285 - protein, 9 aa, synthetic construct
VEFSEKELS

SEQ ID NO: 24286 - protein, 8 aa, synthetic construct
DFIWLLLA

SEQ ID NO: 24287 - protein, 9 aa, synthetic construct
LVEGDPIVA

SEQ ID NO: 24288 - protein, 9 aa, synthetic construct
VGPEPAWEA

SEQ ID NO: 24289 - protein, 11 aa, synthetic construct
TNVVLRGVEEV

SEQ ID NO: 24290 - protein, 10 aa, synthetic construct
VEGSLWAVGT

SEQ ID NO: 24291 - protein, 8 aa, synthetic construct
YDYEKLFA

SEQ ID NO: 24292 - protein, 11 aa, synthetic construct
QISAGTSHSLA

SEQ ID NO: 24293 - protein, 9 aa, synthetic construct
VDSFSLEVA

SEQ ID NO: 24294 - protein, 8 aa, synthetic construct
LDDLPELQ

SEQ ID NO: 24295 - protein, 8 aa, synthetic construct
LEVDPEIQ

SEQ ID NO: 24296 - protein, 10 aa, synthetic construct
VEKEEAVFEA

SEQ ID NO: 24297 - protein, 9 aa, synthetic construct
LDLSALPAT

SEQ ID NO: 24298 - protein, 11 aa, synthetic construct
AAVLFATDIAA

SEQ ID NO: 24299 - protein, 11 aa, synthetic construct
IDANGILNVTA

SEQ ID NO: 24300 - protein, 8 aa, synthetic construct
FLDLLFEP

SEQ ID NO: 24301 - protein, 8 aa, synthetic construct
DVQMKLEV

SEQ ID NO: 24302 - protein, 8 aa, synthetic construct
LDHLHVEV

SEQ ID NO: 24303 - protein, 11 aa, synthetic construct
IDLLRDAIVKV

SEQ ID NO: 24304 - protein, 11 aa, synthetic construct
VLELVLRKGLD

SEQ ID NO: 24305 - protein, 9 aa, synthetic construct
VNELTPVGT

SEQ ID NO: 24306 - protein, 9 aa, synthetic construct
DIPRNQPLP

SEQ ID NO: 24307 - protein, 8 aa, synthetic construct
LDLWIRLS

SEQ ID NO: 24308 - protein, 9 aa, synthetic construct
DISVATKLL

SEQ ID NO: 24309 - protein, 9 aa, synthetic construct
VETHVSYII

SEQ ID NO: 24310 - protein, 9 aa, synthetic construct
TASLEVEVP

SEQ ID NO: 24311 - protein, 9 aa, synthetic construct
LEGGVDVNI

SEQ ID NO: 24312 - protein, 9 aa, synthetic construct
LQEADLQVD

SEQ ID NO: 24313 - protein, 9 aa, synthetic construct
EVVPEQGIV

SEQ ID NO: 24314 - protein, 9 aa, synthetic construct
WDSALFAEL

SEQ ID NO: 24315 - protein, 10 aa, synthetic construct
VSMRDSLDLP

SEQ ID NO: 24316 - protein, 9 aa, synthetic construct
DLEYVSSPP

SEQ ID NO: 24317 - protein, 9 aa, synthetic construct
VEKMTSFVK

SEQ ID NO: 24318 - protein, 8 aa, synthetic construct
VELIKYKV

SEQ ID NO: 24319 - protein, 10 aa, synthetic construct
VFAGVTTTVL

SEQ ID NO: 24320 - protein, 11 aa, synthetic construct
VPTYGAIILDE

SEQ ID NO: 24321 - protein, 9 aa, synthetic construct
VFCNLPISI

SEQ ID NO: 24322 - protein, 9 aa, synthetic construct
LLDTMEQMS

SEQ ID NO: 24323 - protein, 9 aa, synthetic construct
VQFMACNLL

SEQ ID NO: 24324 - protein, 9 aa, synthetic construct
VFDCKFSQD

SEQ ID NO: 24325 - protein, 10 aa, synthetic construct
VFDAVVEAVA

SEQ ID NO: 24326 - protein, 11 aa, synthetic construct
VFASLSPEGLL

SEQ ID NO: 24327 - protein, 8 aa, synthetic construct
VFDVWGVI

SEQ ID NO: 24328 - protein, 11 aa, synthetic construct
VFDADEIGSDN

SEQ ID NO: 24329 - protein, 10 aa, synthetic construct
QPALPTLAEI

SEQ ID NO: 24330 - protein, 8 aa, synthetic construct
LFLGDQTI

SEQ ID NO: 24331 - protein, 8 aa, synthetic construct
MTILGNTF

SEQ ID NO: 24332 - protein, 10 aa, synthetic construct
MTSAVMEVFG

SEQ ID NO: 24333 - protein, 10 aa, synthetic construct
VFDFRSSSSV

SEQ ID NO: 24334 - protein, 9 aa, synthetic construct
VIASPVVPM

SEQ ID NO: 24335 - protein, 9 aa, synthetic construct
VFDVINLLN

SEQ ID NO: 24336 - protein, 8 aa, synthetic construct
VFDKLSPL

SEQ ID NO: 24337 - protein, 9 aa, synthetic construct
VLHLSGMVL

SEQ ID NO: 24338 - protein, 10 aa, synthetic construct
VFDIVTSQIF

SEQ ID NO: 24339 - protein, 10 aa, synthetic construct
FVHPGSTGSV

SEQ ID NO: 24340 - protein, 10 aa, synthetic construct
LSLMTAMVTQ

SEQ ID NO: 24341 - protein, 9 aa, synthetic construct
IFDWVEANL

SEQ ID NO: 24342 - protein, 11 aa, synthetic construct
TRVEVTEFEDI

SEQ ID NO: 24343 - protein, 8 aa, synthetic construct
VVFGLLLS

SEQ ID NO: 24344 - protein, 10 aa, synthetic construct
NPKPDVCIVF

SEQ ID NO: 24345 - protein, 9 aa, synthetic construct
WKNLSNPEM

SEQ ID NO: 24346 - protein, 10 aa, synthetic construct
QRGPQTAETM

SEQ ID NO: 24347 - protein, 9 aa, synthetic construct
VFATPSPII

SEQ ID NO: 24348 - protein, 9 aa, synthetic construct
VFLNKELQS

SEQ ID NO: 24349 - protein, 10 aa, synthetic construct
FTEADLENLF

SEQ ID NO: 24350 - protein, 8 aa, synthetic construct
VGKHILFV

SEQ ID NO: 24351 - protein, 8 aa, synthetic construct
AHVKLVFV

SEQ ID NO: 24352 - protein, 9 aa, synthetic construct
VFLKLPDLE

SEQ ID NO: 24353 - protein, 7 aa, synthetic construct
VFLTTYR

SEQ ID NO: 24354 - protein, 10 aa, synthetic construct
VFLATSQPLI

SEQ ID NO: 24355 - protein, 8 aa, synthetic construct
VPLSFGVR

SEQ ID NO: 24356 - protein, 8 aa, synthetic construct
LSFPLATI

SEQ ID NO: 24357 - protein, 9 aa, synthetic construct
VFHLVYQCL

SEQ ID NO: 24358 - protein, 8 aa, synthetic construct
LSVVERAE

SEQ ID NO: 24359 - protein, 10 aa, synthetic construct
MTSAVREPKL

SEQ ID NO: 24360 - protein, 8 aa, synthetic construct
FVHRFPFV

SEQ ID NO: 24361 - protein, 9 aa, synthetic construct
FVSYLAHLV

SEQ ID NO: 24362 - protein, 10 aa, synthetic construct
VEYGVAGSKE

SEQ ID NO: 24363 - protein, 12 aa, synthetic construct
VYFTSDNGGHLE

SEQ ID NO: 24364 - protein, 8 aa, synthetic construct
LHEFIDVY

SEQ ID NO: 24365 - protein, 8 aa, synthetic construct
VGEDAQSK

SEQ ID NO: 24366 - protein, 9 aa, synthetic construct
GVDLPMVPV

SEQ ID NO: 24367 - protein, 10 aa, synthetic construct
AAELAARGPA

SEQ ID NO: 24368 - protein, 12 aa, synthetic construct
SPSLSPNEKAGP

SEQ ID NO: 24369 - protein, 12 aa, synthetic construct
SPSLSPQVNGTP

SEQ ID NO: 24370 - protein, 11 aa, synthetic construct
AEIAESIQVHS

SEQ ID NO: 24371 - protein, 11 aa, synthetic construct
PSSIIAHNCVS

SEQ ID NO: 24372 - protein, 8 aa, synthetic construct
DPNLVVFL

SEQ ID NO: 24373 - protein, 8 aa, synthetic construct
VFGVLLLS

SEQ ID NO: 24374 - protein, 12 aa, synthetic construct
VGHSGIWSFGVN

SEQ ID NO: 24375 - protein, 9 aa, synthetic construct
RYGLFLGAI

SEQ ID NO: 24376 - protein, 9 aa, synthetic construct
ALAELATSY

SEQ ID NO: 24377 - protein, 9 aa, synthetic construct
VGKSKGLFL

SEQ ID NO: 24378 - protein, 9 aa, synthetic construct
VGLVLSLMS

SEQ ID NO: 24379 - protein, 8 aa, synthetic construct
RLCVRKSL

SEQ ID NO: 24380 - protein, 10 aa, synthetic construct
VVAARGVIIA

SEQ ID NO: 24381 - protein, 9 aa, synthetic construct
VILLGRHSL

SEQ ID NO: 24382 - protein, 7 aa, synthetic construct
VQREAFR

SEQ ID NO: 24383 - protein, 9 aa, synthetic construct
GEPVNLTEI

SEQ ID NO: 24384 - protein, 8 aa, synthetic construct
VGPQPPFS

SEQ ID NO: 24385 - protein, 8 aa, synthetic construct
RPGSSLRP

SEQ ID NO: 24386 - protein, 8 aa, synthetic construct
VGPVTRVP

SEQ ID NO: 24387 - protein, 9 aa, synthetic construct
VVMATSSLL

SEQ ID NO: 24388 - protein, 11 aa, synthetic construct
ISAHGRDVSGV

SEQ ID NO: 24389 - protein, 12 aa, synthetic construct
RAGSPGPAAVDV

SEQ ID NO: 24390 - protein, 8 aa, synthetic construct
VGKSTLLH

SEQ ID NO: 24391 - protein, 9 aa, synthetic construct
GYVLGAPLV

SEQ ID NO: 24392 - protein, 8 aa, synthetic construct
VGYRAKEL

SEQ ID NO: 24393 - protein, 12 aa, synthetic construct
SPLHVLATSDSV

SEQ ID NO: 24394 - protein, 9 aa, synthetic construct
PQVPGLGPD

SEQ ID NO: 24395 - protein, 10 aa, synthetic construct
VHVPGPHAMT

SEQ ID NO: 24396 - protein, 9 aa, synthetic construct
VHLTLPDGT

SEQ ID NO: 24397 - protein, 9 aa, synthetic construct
HVAPLPDTY

SEQ ID NO: 24398 - protein, 8 aa, synthetic construct
VLDEEGVA

SEQ ID NO: 24399 - protein, 12 aa, synthetic construct
ASAGNGAAGVLV

SEQ ID NO: 24400 - protein, 9 aa, synthetic construct
VLDGNLRKD

SEQ ID NO: 24401 - protein, 9 aa, synthetic construct
LDEKEQALY

SEQ ID NO: 24402 - protein, 8 aa, synthetic construct
VLESHQWA

SEQ ID NO: 24403 - protein, 9 aa, synthetic construct
VLEFQGGGY

SEQ ID NO: 24404 - protein, 9 aa, synthetic construct
LVIDFLPST

SEQ ID NO: 24405 - protein, 11 aa, synthetic construct
RSAPANSGLVE

SEQ ID NO: 24406 - protein, 11 aa, synthetic construct
KMPISSHVDLG

SEQ ID NO: 24407 - protein, 12 aa, synthetic construct
TTTITTTTTTTG

SEQ ID NO: 24408 - protein, 11 aa, synthetic construct
GATAVQPDRVW

SEQ ID NO: 24409 - protein, 8 aa, synthetic construct
LVHMDIKP

SEQ ID NO: 24410 - protein, 9 aa, synthetic construct
VLHLHNPTV

SEQ ID NO: 24411 - protein, 10 aa, synthetic construct
VILGPPASGK

SEQ ID NO: 24412 - protein, 10 aa, synthetic construct
VIILKSFEMD

SEQ ID NO: 24413 - protein, 9 aa, synthetic construct
KDPKVLAEY

SEQ ID NO: 24414 - protein, 9 aa, synthetic construct
VLPLLFVTI

SEQ ID NO: 24415 - protein, 9 aa, synthetic construct
VILSEIFLK

SEQ ID NO: 24416 - protein, 12 aa, synthetic construct
LVIPHPSIIDLG

SEQ ID NO: 24417 - protein, 8 aa, synthetic construct
NAPKSPLT

SEQ ID NO: 24418 - protein, 10 aa, synthetic construct
NQGLDFFIIV

SEQ ID NO: 24419 - protein, 9 aa, synthetic construct
ELPVDNLVI

SEQ ID NO: 24420 - protein, 9 aa, synthetic construct
AQSKLALVL

SEQ ID NO: 24421 - protein, 9 aa, synthetic construct
VIPHKSHIL

SEQ ID NO: 24422 - protein, 9 aa, synthetic construct
VLLSTPAPL

SEQ ID NO: 24423 - protein, 10 aa, synthetic construct
IPGGTVVLEP

SEQ ID NO: 24424 - protein, 10 aa, synthetic construct
GALDFQVLGL

SEQ ID NO: 24425 - protein, 9 aa, synthetic construct
VLRKKLGEL

SEQ ID NO: 24426 - protein, 10 aa, synthetic construct
VLGTIGPPAL

SEQ ID NO: 24427 - protein, 9 aa, synthetic construct
VLETLSVLD

SEQ ID NO: 24428 - protein, 10 aa, synthetic construct
VLTQLSSRFK

SEQ ID NO: 24429 - protein, 10 aa, synthetic construct
VLGAVRLPPC

SEQ ID NO: 24430 - protein, 9 aa, synthetic construct
IVYPLEKLG

SEQ ID NO: 24431 - protein, 9 aa, synthetic construct
VLSRSLPLF

SEQ ID NO: 24432 - protein, 12 aa, synthetic construct
LVPSPAPSSLPF

SEQ ID NO: 24433 - protein, 9 aa, synthetic construct
LVYYLHRTF

SEQ ID NO: 24434 - protein, 10 aa, synthetic construct
IVYKNSIDLF

SEQ ID NO: 24435 - protein, 10 aa, synthetic construct
KGLLYTBYTL

SEQ ID NO: 24436 - protein, 8 aa, synthetic construct
LTENILKV

SEQ ID NO: 24437 - protein, 10 aa, synthetic construct
VSSVDGVLVL

SEQ ID NO: 24438 - protein, 9 aa, synthetic construct
LILSQDSVI

SEQ ID NO: 24439 - protein, 9 aa, synthetic construct
LTSELNVVL

SEQ ID NO: 24440 - protein, 8 aa, synthetic construct
VARDQDKV

SEQ ID NO: 24441 - protein, 8 aa, synthetic construct
VKNVLDDI

SEQ ID NO: 24442 - protein, 8 aa, synthetic construct
VKEKGLVL

SEQ ID NO: 24443 - protein, 8 aa, synthetic construct
VIKTVGSF

SEQ ID NO: 24444 - protein, 8 aa, synthetic construct
VKPPATAT

SEQ ID NO: 24445 - protein, 10 aa, synthetic construct
VLSTSGVLIL

SEQ ID NO: 24446 - protein, 8 aa, synthetic construct
QILSEPIQ

SEQ ID NO: 24447 - protein, 10 aa, synthetic construct
LDRASSSLYV

SEQ ID NO: 24448 - protein, 10 aa, synthetic construct
VLAAANPIES

SEQ ID NO: 24449 - protein, 8 aa, synthetic construct
VLAVHLWM

SEQ ID NO: 24450 - protein, 9 aa, synthetic construct
VIAIVEREN

SEQ ID NO: 24451 - protein, 10 aa, synthetic construct
AASLPSVWTL

SEQ ID NO: 24452 - protein, 12 aa, synthetic construct
VDAGQALLLAPS

SEQ ID NO: 24453 - protein, 11 aa, synthetic construct
LAVGLALTGNG

SEQ ID NO: 24454 - protein, 10 aa, synthetic construct
IVAHAEQQTV

SEQ ID NO: 24455 - protein, 9 aa, synthetic construct
GLVHTLAIV

SEQ ID NO: 24456 - protein, 10 aa, synthetic construct
VIAPLMTRHG

SEQ ID NO: 24457 - protein, 8 aa, synthetic construct
GLLKPDQF

SEQ ID NO: 24458 - protein, 9 aa, synthetic construct
LGLAWIVGR

SEQ ID NO: 24459 - protein, 9 aa, synthetic construct
ALVDECCLL

SEQ ID NO: 24460 - protein, 9 aa, synthetic construct
IVLCEIIGQ

SEQ ID NO: 24461 - protein, 10 aa, synthetic construct
VIDTGIALFV

SEQ ID NO: 24462 - protein, 10 aa, synthetic construct
VLSSEFAVIV

SEQ ID NO: 24463 - protein, 9 aa, synthetic construct
LVDVELIYG

SEQ ID NO: 24464 - protein, 10 aa, synthetic construct
VLDMATKMTG

SEQ ID NO: 24465 - protein, 9 aa, synthetic construct
MLENYNSIV

SEQ ID NO: 24466 - protein, 8 aa, synthetic construct
VLDILRDF

SEQ ID NO: 24467 - protein, 9 aa, synthetic construct
VLAQEVVVF

SEQ ID NO: 24468 - protein, 10 aa, synthetic construct
SPSLGSPMYL

SEQ ID NO: 24469 - protein, 10 aa, synthetic construct
VLYEVPLPPP

SEQ ID NO: 24470 - protein, 9 aa, synthetic construct
VLFHSPKKQ

SEQ ID NO: 24471 - protein, 9 aa, synthetic construct
VPCNILVGY

SEQ ID NO: 24472 - protein, 12 aa, synthetic construct
VIFAVESSPSAV

SEQ ID NO: 24473 - protein, 10 aa, synthetic construct
LVPLAREVNK

SEQ ID NO: 24474 - protein, 8 aa, synthetic construct
VINQEELR

SEQ ID NO: 24475 - protein, 9 aa, synthetic construct
IVFLHNISP

SEQ ID NO: 24476 - protein, 10 aa, synthetic construct
APQGTRLPSL

SEQ ID NO: 24477 - protein, 9 aa, synthetic construct
VLFTSSPIK

SEQ ID NO: 24478 - protein, 8 aa, synthetic construct
LVIGRILV

SEQ ID NO: 24479 - protein, 10 aa, synthetic construct
VLHTTGALTL

SEQ ID NO: 24480 - protein, 8 aa, synthetic construct
VILDISNY

SEQ ID NO: 24481 - protein, 9 aa, synthetic construct
VLLDVLCLL

SEQ ID NO: 24482 - protein, 10 aa, synthetic construct
VLLDYVGNVQ

SEQ ID NO: 24483 - protein, 9 aa, synthetic construct
VILGDGRKP

SEQ ID NO: 24484 - protein, 9 aa, synthetic construct
VGIAVIRNE

SEQ ID NO: 24485 - protein, 10 aa, synthetic construct
VLLVGGRGAE

SEQ ID NO: 24486 - protein, 10 aa, synthetic construct
LVRALGGVGE

SEQ ID NO: 24487 - protein, 9 aa, synthetic construct
LVISLLPYV

SEQ ID NO: 24488 - protein, 9 aa, synthetic construct
VLKPLLIQP

SEQ ID NO: 24489 - protein, 9 aa, synthetic construct
VILHLTVLL

SEQ ID NO: 24490 - protein, 9 aa, synthetic construct
VIKQLLQKF

SEQ ID NO: 24491 - protein, 10 aa, synthetic construct
VILANHAIKL

SEQ ID NO: 24492 - protein, 9 aa, synthetic construct
VILSAHKLV

SEQ ID NO: 24493 - protein, 9 aa, synthetic construct
VLGRTNLLI

SEQ ID NO: 24494 - protein, 10 aa, synthetic construct
RGARAPLLGA

SEQ ID NO: 24495 - protein, 8 aa, synthetic construct
VIDLIFEK

SEQ ID NO: 24496 - protein, 10 aa, synthetic construct
VLLCDLINKL

SEQ ID NO: 24497 - protein, 10 aa, synthetic construct
VIELGDTAFI

SEQ ID NO: 24498 - protein, 8 aa, synthetic construct
VLLNGLSL

SEQ ID NO: 24499 - protein, 9 aa, synthetic construct
YNRSPIVLV

SEQ ID NO: 24500 - protein, 9 aa, synthetic construct
LVLSFAIKV

SEQ ID NO: 24501 - protein, 9 aa, synthetic construct
LVLLTNLLV

SEQ ID NO: 24502 - protein, 8 aa, synthetic construct
LLVPQTEL

SEQ ID NO: 24503 - protein, 8 aa, synthetic construct
PQRFLLHV

SEQ ID NO: 24504 - protein, 9 aa, synthetic construct
LVLESLLHL

SEQ ID NO: 24505 - protein, 9 aa, synthetic construct
VLQSCLLVI

SEQ ID NO: 24506 - protein, 13 aa, synthetic construct
LVLTPPSVLGAGA

SEQ ID NO: 24507 - protein, 12 aa, synthetic construct
VLLPDLAAKASP

SEQ ID NO: 24508 - protein, 11 aa, synthetic construct
FGPNLLWAKDA

SEQ ID NO: 24509 - protein, 8 aa, synthetic construct
VKGAEVAS

SEQ ID NO: 24510 - protein, 9 aa, synthetic construct
PTKPTESLV

SEQ ID NO: 24511 - protein, 8 aa, synthetic construct
IFENNIIV

SEQ ID NO: 24512 - protein, 10 aa, synthetic construct
GNLNQYAIVL

SEQ ID NO: 24513 - protein, 10 aa, synthetic construct
VIPDVVQMRQ

SEQ ID NO: 24514 - protein, 10 aa, synthetic construct
LVPGNPPSLV

SEQ ID NO: 24515 - protein, 9 aa, synthetic construct
FNKQDSLVI

SEQ ID NO: 24516 - protein, 11 aa, synthetic construct
VLVPAGVGAAI

SEQ ID NO: 24517 - protein, 10 aa, synthetic construct
FHPLPTVIIV

SEQ ID NO: 24518 - protein, 11 aa, synthetic construct
VLPDDKGGLKS

SEQ ID NO: 24519 - protein, 11 aa, synthetic construct
AKEPSVNTALV

SEQ ID NO: 24520 - protein, 11 aa, synthetic construct
VIPVSQQTLGS

SEQ ID NO: 24521 - protein, 9 aa, synthetic construct
LNIVENLLM

SEQ ID NO: 24522 - protein, 10 aa, synthetic construct
VITDDIWPKP

SEQ ID NO: 24523 - protein, 10 aa, synthetic construct
VIPSHQVSTL

SEQ ID NO: 24524 - protein, 9 aa, synthetic construct
VLQRQILLA

SEQ ID NO: 24525 - protein, 9 aa, synthetic construct
KKLAAGHEL

SEQ ID NO: 24526 - protein, 9 aa, synthetic construct
VLSAAHCFM

SEQ ID NO: 24527 - protein, 8 aa, synthetic construct
VLSGEVLN

SEQ ID NO: 24528 - protein, 11 aa, synthetic construct
VLSPASDKGGL

SEQ ID NO: 24529 - protein, 9 aa, synthetic construct
VLAYSGGLD

SEQ ID NO: 24530 - protein, 9 aa, synthetic construct
VLNSVTQTI

SEQ ID NO: 24531 - protein, 9 aa, synthetic construct
VGLLDVIAN

SEQ ID NO: 24532 - protein, 9 aa, synthetic construct
TTNEVVLAV

SEQ ID NO: 24533 - protein, 10 aa, synthetic construct
IVVGNVSKYI

SEQ ID NO: 24534 - protein, 7 aa, synthetic construct
VIVGNFL

SEQ ID NO: 24535 - protein, 10 aa, synthetic construct
VIVQFGGKPF

SEQ ID NO: 24536 - protein, 10 aa, synthetic construct
VLVLYDKIKE

SEQ ID NO: 24537 - protein, 9 aa, synthetic construct
FLFNDVLVV

SEQ ID NO: 24538 - protein, 9 aa, synthetic construct
MVLSVFIGK

SEQ ID NO: 24539 - protein, 10 aa, synthetic construct
VLLCLSAVSL

SEQ ID NO: 24540 - protein, 11 aa, synthetic construct
VIHLGSSHSSI

SEQ ID NO: 24541 - protein, 11 aa, synthetic construct
VLLAGAGKMKL

SEQ ID NO: 24542 - protein, 8 aa, synthetic construct
VYRQRRKY

SEQ ID NO: 24543 - protein, 10 aa, synthetic construct
VISSKEKSKY

SEQ ID NO: 24544 - protein, 10 aa, synthetic construct
VLYKGEAKVV

SEQ ID NO: 24545 - protein, 9 aa, synthetic construct
VLSRELIEM

SEQ ID NO: 24546 - protein, 9 aa, synthetic construct
LESELYEVV

SEQ ID NO: 24547 - protein, 9 aa, synthetic construct
FLTQESLQL

SEQ ID NO: 24548 - protein, 10 aa, synthetic construct
VLYQTLAFPA

SEQ ID NO: 24549 - protein, 9 aa, synthetic construct
VIEYRSQKT

SEQ ID NO: 24550 - protein, 9 aa, synthetic construct
SVVIYTMLV

SEQ ID NO: 24551 - protein, 8 aa, synthetic construct
LYLSGIEV

SEQ ID NO: 24552 - protein, 9 aa, synthetic construct
VLRPSMIDI

SEQ ID NO: 24553 - protein, 9 aa, synthetic construct
DVEMKLVYI

SEQ ID NO: 24554 - protein, 9 aa, synthetic construct
VLSAMTLYI

SEQ ID NO: 24555 - protein, 9 aa, synthetic construct
IKEMVELPL

SEQ ID NO: 24556 - protein, 10 aa, synthetic construct
LSLGVSMPLI

SEQ ID NO: 24557 - protein, 9 aa, synthetic construct
EHLPWMIVL

SEQ ID NO: 24558 - protein, 10 aa, synthetic construct
VLMTSLGEVL

SEQ ID NO: 24559 - protein, 9 aa, synthetic construct
VMSALRPLL

SEQ ID NO: 24560 - protein, 9 aa, synthetic construct
MVPRLTAVL

SEQ ID NO: 24561 - protein, 10 aa, synthetic construct
VMESVKAGVV

SEQ ID NO: 24562 - protein, 10 aa, synthetic construct
VMEGLRKNNP

SEQ ID NO: 24563 - protein, 8 aa, synthetic construct
IPTVMFTV

SEQ ID NO: 24564 - protein, 8 aa, synthetic construct
IVLGLMVL

SEQ ID NO: 24565 - protein, 8 aa, synthetic construct
LMVMGITL

SEQ ID NO: 24566 - protein, 8 aa, synthetic construct
MVYRVLVQ

SEQ ID NO: 24567 - protein, 8 aa, synthetic construct
LGLMMVTI

SEQ ID NO: 24568 - protein, 10 aa, synthetic construct
VNALVDIIHG

SEQ ID NO: 24569 - protein, 13 aa, synthetic construct
SPGTAAVGGSSLD

SEQ ID NO: 24570 - protein, 9 aa, synthetic construct
VNMLTISWK

SEQ ID NO: 24571 - protein, 10 aa, synthetic construct
LRSSSSLERG

SEQ ID NO: 24572 - protein, 10 aa, synthetic construct
KEFGPSLTNV

SEQ ID NO: 24573 - protein, 9 aa, synthetic construct
EKFGEIRNV

SEQ ID NO: 24574 - protein, 9 aa, synthetic construct
VNGLVLESR

SEQ ID NO: 24575 - protein, 9 aa, synthetic construct
VENKRHLAL

SEQ ID NO: 24576 - protein, 9 aa, synthetic construct
VNIIPVIGK

SEQ ID NO: 24577 - protein, 10 aa, synthetic construct
VGVSVIVKNV

SEQ ID NO: 24578 - protein, 11 aa, synthetic construct
VNLGGKTSVTV

SEQ ID NO: 24579 - protein, 9 aa, synthetic construct
QKAVPVRPV

SEQ ID NO: 24580 - protein, 9 aa, synthetic construct
VVRPKDLAL

SEQ ID NO: 24581 - protein, 9 aa, synthetic construct
AGPLVFIGS

SEQ ID NO: 24582 - protein, 9 aa, synthetic construct
PGIAVGFLS

SEQ ID NO: 24583 - protein, 9 aa, synthetic construct
VPGEIGLNY

SEQ ID NO: 24584 - protein, 9 aa, synthetic construct
GPEVILLLF

SEQ ID NO: 24585 - protein, 9 aa, synthetic construct
EPGLSPIMI

SEQ ID NO: 24586 - protein, 9 aa, synthetic construct
VVVPAEEAL

SEQ ID NO: 24587 - protein, 9 aa, synthetic construct
PAEPKLAFV

SEQ ID NO: 24588 - protein, 9 aa, synthetic construct
VPLPNSVFV

SEQ ID NO: 24589 - protein, 9 aa, synthetic construct
VEAPSPLSL

SEQ ID NO: 24590 - protein, 9 aa, synthetic construct
AEPSLGAVL

SEQ ID NO: 24591 - protein, 9 aa, synthetic construct
DPLALSVLL

SEQ ID NO: 24592 - protein, 10 aa, synthetic construct
VPSPYEVRVF

SEQ ID NO: 24593 - protein, 8 aa, synthetic construct
VPANGLAV

SEQ ID NO: 24594 - protein, 8 aa, synthetic construct
PLNGAVAV

SEQ ID NO: 24595 - protein, 9 aa, synthetic construct
VGQLPGLTI

SEQ ID NO: 24596 - protein, 10 aa, synthetic construct
PVIKLSTVLV

SEQ ID NO: 24597 - protein, 10 aa, synthetic construct
VPAIRWLGLL

SEQ ID NO: 24598 - protein, 9 aa, synthetic construct
VMELPEGWY

SEQ ID NO: 24599 - protein, 11 aa, synthetic construct
PAVESMPMSVY

SEQ ID NO: 24600 - protein, 10 aa, synthetic construct
PGVPLLPMLS

SEQ ID NO: 24601 - protein, 9 aa, synthetic construct
YTACVRVPV

SEQ ID NO: 24602 - protein, 11 aa, synthetic construct
VPAPAPPAHAH

SEQ ID NO: 24603 - protein, 8 aa, synthetic construct
FASPVSSL

SEQ ID NO: 24604 - protein, 9 aa, synthetic construct
ISVPAPLDF

SEQ ID NO: 24605 - protein, 8 aa, synthetic construct
LPKEMVSL

SEQ ID NO: 24606 - protein, 10 aa, synthetic construct
SGIIPGSYSF

SEQ ID NO: 24607 - protein, 9 aa, synthetic construct
GVPLSLGPF

SEQ ID NO: 24608 - protein, 9 aa, synthetic construct
VGPTVLPGF

SEQ ID NO: 24609 - protein, 10 aa, synthetic construct
VPLLFLEMAA

SEQ ID NO: 24610 - protein, 10 aa, synthetic construct
VAPVYNRSTL

SEQ ID NO: 24611 - protein, 9 aa, synthetic construct
PGISITVLP

SEQ ID NO: 24612 - protein, 8 aa, synthetic construct
VEYPNETF

SEQ ID NO: 24613 - protein, 11 aa, synthetic construct
EENPDFEGIPV

SEQ ID NO: 24614 - protein, 9 aa, synthetic construct
FVREALKPV

SEQ ID NO: 24615 - protein, 9 aa, synthetic construct
VAEQPPLKL

SEQ ID NO: 24616 - protein, 11 aa, synthetic construct
VPGVDADDRLL

SEQ ID NO: 24617 - protein, 11 aa, synthetic construct
LGPFIVGCAHV

SEQ ID NO: 24618 - protein, 13 aa, synthetic construct
QTVSVANLGAAGV

SEQ ID NO: 24619 - protein, 11 aa, synthetic construct
VPLAPSAWSEL

SEQ ID NO: 24620 - protein, 11 aa, synthetic construct
VINGQEVKYAL

SEQ ID NO: 24621 - protein, 12 aa, synthetic construct
VSLSVADMLVAI

SEQ ID NO: 24622 - protein, 11 aa, synthetic construct
GSSVPDLIVSM

SEQ ID NO: 24623 - protein, 13 aa, synthetic construct
AVGSGATFSHYYY

SEQ ID NO: 24624 - protein, 10 aa, synthetic construct
VLGHMLSGKS

SEQ ID NO: 24625 - protein, 9 aa, synthetic construct
QIGLSREPV

SEQ ID NO: 24626 - protein, 11 aa, synthetic construct
VPEHFIADGSS

SEQ ID NO: 24627 - protein, 10 aa, synthetic construct
VKSIKMNDVY

SEQ ID NO: 24628 - protein, 11 aa, synthetic construct
VPESSLPPASM

SEQ ID NO: 24629 - protein, 9 aa, synthetic construct
VPEVSIKTP

SEQ ID NO: 24630 - protein, 11 aa, synthetic construct
DSGNGSQVLQL

SEQ ID NO: 24631 - protein, 9 aa, synthetic construct
VTMERTIQL

SEQ ID NO: 24632 - protein, 9 aa, synthetic construct
VPFSWIYCS

SEQ ID NO: 24633 - protein, 10 aa, synthetic construct
VNMGLSPPGY

SEQ ID NO: 24634 - protein, 9 aa, synthetic construct
VLMVTQRNY

SEQ ID NO: 24635 - protein, 12 aa, synthetic construct
YFPSSSVKPCPV

SEQ ID NO: 24636 - protein, 11 aa, synthetic construct
KNTLPGVGPYE

SEQ ID NO: 24637 - protein, 10 aa, synthetic construct
GKKEAGIPEF

SEQ ID NO: 24638 - protein, 9 aa, synthetic construct
NTKSEIMEL

SEQ ID NO: 24639 - protein, 10 aa, synthetic construct
VPFKRLSGVS

SEQ ID NO: 24640 - protein, 8 aa, synthetic construct
VLHRIMLI

SEQ ID NO: 24641 - protein, 9 aa, synthetic construct
VPFHNLGLL

SEQ ID NO: 24642 - protein, 10 aa, synthetic construct
PACFETLTAY

SEQ ID NO: 24643 - protein, 11 aa, synthetic construct
VFPALVAGLPI

SEQ ID NO: 24644 - protein, 9 aa, synthetic construct
RKDSSEQLF

SEQ ID NO: 24645 - protein, 8 aa, synthetic construct
PFLSPLEF

SEQ ID NO: 24646 - protein, 8 aa, synthetic construct
YQKKEEDW

SEQ ID NO: 24647 - protein, 10 aa, synthetic construct
VPGPEAGRAS

SEQ ID NO: 24648 - protein, 9 aa, synthetic construct
VPCVKGTLS

SEQ ID NO: 24649 - protein, 9 aa, synthetic construct
VELLGETSI

SEQ ID NO: 24650 - protein, 9 aa, synthetic construct
PVTTEITSL

SEQ ID NO: 24651 - protein, 11 aa, synthetic construct
VSFLHFHNDVP

SEQ ID NO: 24652 - protein, 8 aa, synthetic construct
ITLYRNGY

SEQ ID NO: 24653 - protein, 10 aa, synthetic construct
PVLQTSGTSG

SEQ ID NO: 24654 - protein, 9 aa, synthetic construct
IPVTPQNVY

SEQ ID NO: 24655 - protein, 9 aa, synthetic construct
VLPSKEEPV

SEQ ID NO: 24656 - protein, 9 aa, synthetic construct
PKVAARLAV

SEQ ID NO: 24657 - protein, 9 aa, synthetic construct
VPKRKSEAL

SEQ ID NO: 24658 - protein, 10 aa, synthetic construct
VPKAHRPGDL

SEQ ID NO: 24659 - protein, 10 aa, synthetic construct
VALIHSLVIF

SEQ ID NO: 24660 - protein, 10 aa, synthetic construct
GLQLLVAAAT

SEQ ID NO: 24661 - protein, 9 aa, synthetic construct
VAVQIISNI

SEQ ID NO: 24662 - protein, 9 aa, synthetic construct
VPLYVPIRL

SEQ ID NO: 24663 - protein, 9 aa, synthetic construct
VPGVKSAVV

SEQ ID NO: 24664 - protein, 10 aa, synthetic construct
LARFADGSAV

SEQ ID NO: 24665 - protein, 9 aa, synthetic construct
LPGLQAQLA

SEQ ID NO: 24666 - protein, 12 aa, synthetic construct
VPGVAQRSLPLQ

SEQ ID NO: 24667 - protein, 9 aa, synthetic construct
DRPMLPQEY

SEQ ID NO: 24668 - protein, 10 aa, synthetic construct
PEEVVINLEY

SEQ ID NO: 24669 - protein, 9 aa, synthetic construct
VLPEITVRY

SEQ ID NO: 24670 - protein, 9 aa, synthetic construct
VPIELLQFF

SEQ ID NO: 24671 - protein, 9 aa, synthetic construct
VPLPTTSTL

SEQ ID NO: 24672 - protein, 9 aa, synthetic construct
VLPGMSLTF

SEQ ID NO: 24673 - protein, 10 aa, synthetic construct
VPLVAAPLFL

SEQ ID NO: 24674 - protein, 10 aa, synthetic construct
VPLLGSEEEF

SEQ ID NO: 24675 - protein, 9 aa, synthetic construct
FTVLELRPV

SEQ ID NO: 24676 - protein, 8 aa, synthetic construct
QGPVRQVV

SEQ ID NO: 24677 - protein, 10 aa, synthetic construct
PRPFPLGRLV

SEQ ID NO: 24678 - protein, 11 aa, synthetic construct
PRGAARIKSPV

SEQ ID NO: 24679 - protein, 10 aa, synthetic construct
VSRLHTARVL

SEQ ID NO: 24680 - protein, 9 aa, synthetic construct
SDRVFLDEF

SEQ ID NO: 24681 - protein, 9 aa, synthetic construct
VGRLQKPCF

SEQ ID NO: 24682 - protein, 9 aa, synthetic construct
VPRRKAERG

SEQ ID NO: 24683 - protein, 9 aa, synthetic construct
PVDRRTLLV

SEQ ID NO: 24684 - protein, 10 aa, synthetic construct
VPQWVITIII

SEQ ID NO: 24685 - protein, 8 aa, synthetic construct
VPQHAAAI

SEQ ID NO: 24686 - protein, 10 aa, synthetic construct
LSQHEPKTPV

SEQ ID NO: 24687 - protein, 10 aa, synthetic construct
FFVVSVNMPV

SEQ ID NO: 24688 - protein, 9 aa, synthetic construct
IKSQPIVFE

SEQ ID NO: 24689 - protein, 9 aa, synthetic construct
VPIPDLRAL

SEQ ID NO: 24690 - protein, 10 aa, synthetic construct
VPSDVAGSTL

SEQ ID NO: 24691 - protein, 10 aa, synthetic construct
LGEMKSGVPV

SEQ ID NO: 24692 - protein, 9 aa, synthetic construct
VPVQGSPAL

SEQ ID NO: 24693 - protein, 10 aa, synthetic construct
VPGAGSVPAI

SEQ ID NO: 24694 - protein, 8 aa, synthetic construct
VPQVLLPF

SEQ ID NO: 24695 - protein, 9 aa, synthetic construct
LPRAVLVDL

SEQ ID NO: 24696 - protein, 10 aa, synthetic construct
VHTVQEKGFI

SEQ ID NO: 24697 - protein, 9 aa, synthetic construct
VPVWPVPSL

SEQ ID NO: 24698 - protein, 9 aa, synthetic construct
PQLRVLEEY

SEQ ID NO: 24699 - protein, 10 aa, synthetic construct
RPVQLAPGSL

SEQ ID NO: 24700 - protein, 10 aa, synthetic construct
VPAGIRPQSI

SEQ ID NO: 24701 - protein, 10 aa, synthetic construct
VPNVLAKALY

SEQ ID NO: 24702 - protein, 12 aa, synthetic construct
RALNLLFGALAI

SEQ ID NO: 24703 - protein, 9 aa, synthetic construct
VLAKLCKTI

SEQ ID NO: 24704 - protein, 9 aa, synthetic construct
VPRLETGPL

SEQ ID NO: 24705 - protein, 10 aa, synthetic construct
VKPPQAQTLI

SEQ ID NO: 24706 - protein, 10 aa, synthetic construct
VRSMPGTPAL

SEQ ID NO: 24707 - protein, 7 aa, synthetic construct
VLRHEEF

SEQ ID NO: 24708 - protein, 10 aa, synthetic construct
RGQKASPPTL

SEQ ID NO: 24709 - protein, 8 aa, synthetic construct
VPPASRSI

SEQ ID NO: 24710 - protein, 8 aa, synthetic construct
VPRFLYSI

SEQ ID NO: 24711 - protein, 11 aa, synthetic construct
VQVLLVHAATL

SEQ ID NO: 24712 - protein, 9 aa, synthetic construct
VPLRPRVAL

SEQ ID NO: 24713 - protein, 9 aa, synthetic construct
VPRGLRPLL

SEQ ID NO: 24714 - protein, 11 aa, synthetic construct
LGLRPGPSTSV

SEQ ID NO: 24715 - protein, 9 aa, synthetic construct
VAVGDRVII

SEQ ID NO: 24716 - protein, 11 aa, synthetic construct
KREKVNGKVLV

SEQ ID NO: 24717 - protein, 9 aa, synthetic construct
VVSDGRVMI

SEQ ID NO: 24718 - protein, 11 aa, synthetic construct
AARVRVCLAPV

SEQ ID NO: 24719 - protein, 11 aa, synthetic construct
DLLRGEIEESL

SEQ ID NO: 24720 - protein, 11 aa, synthetic construct
VKSLITALFTL

SEQ ID NO: 24721 - protein, 9 aa, synthetic construct
VLRVPGSSV

SEQ ID NO: 24722 - protein, 8 aa, synthetic construct
FLYLLHTL

SEQ ID NO: 24723 - protein, 9 aa, synthetic construct
ITGHKIIHT

SEQ ID NO: 24724 - protein, 8 aa, synthetic construct
PSDINPVL

SEQ ID NO: 24725 - protein, 8 aa, synthetic construct
SVPENIPV

SEQ ID NO: 24726 - protein, 9 aa, synthetic construct
VPSPANGVI

SEQ ID NO: 24727 - protein, 9 aa, synthetic construct
VEAGEAAII

SEQ ID NO: 24728 - protein, 8 aa, synthetic construct
DIPKIDVY

SEQ ID NO: 24729 - protein, 12 aa, synthetic construct
VPAARKATAAVI

SEQ ID NO: 24730 - protein, 9 aa, synthetic construct
VPQKEGNSL

SEQ ID NO: 24731 - protein, 8 aa, synthetic construct
FVSVFLMY

SEQ ID NO: 24732 - protein, 9 aa, synthetic construct
VSPYPLLSS

SEQ ID NO: 24733 - protein, 9 aa, synthetic construct
VPVTLCMIV

SEQ ID NO: 24734 - protein, 9 aa, synthetic construct
VSPVSASSL

SEQ ID NO: 24735 - protein, 12 aa, synthetic construct
ALTKMSSPSPPV

SEQ ID NO: 24736 - protein, 11 aa, synthetic construct
VSGAAPVSIEA

SEQ ID NO: 24737 - protein, 9 aa, synthetic construct
WQPGSVTVY

SEQ ID NO: 24738 - protein, 9 aa, synthetic construct
ALLSPELLY

SEQ ID NO: 24739 - protein, 9 aa, synthetic construct
LPSLPQTFP

SEQ ID NO: 24740 - protein, 9 aa, synthetic construct
VPSSALREI

SEQ ID NO: 24741 - protein, 10 aa, synthetic construct
LSLRVAGRPV

SEQ ID NO: 24742 - protein, 8 aa, synthetic construct
LIDLLNEY

SEQ ID NO: 24743 - protein, 9 aa, synthetic construct
VPVIMMLTF

SEQ ID NO: 24744 - protein, 10 aa, synthetic construct
VPIAEVAESG

SEQ ID NO: 24745 - protein, 9 aa, synthetic construct
PLTPTVVCT

SEQ ID NO: 24746 - protein, 9 aa, synthetic construct
EDIPVAQTK

SEQ ID NO: 24747 - protein, 10 aa, synthetic construct
YVPVEGDEVT

SEQ ID NO: 24748 - protein, 9 aa, synthetic construct
LPVFVLTDY

SEQ ID NO: 24749 - protein, 10 aa, synthetic construct
VPSTAPVTYP

SEQ ID NO: 24750 - protein, 8 aa, synthetic construct
LSLSRFPV

SEQ ID NO: 24751 - protein, 8 aa, synthetic construct
VPVHLDRV

SEQ ID NO: 24752 - protein, 9 aa, synthetic construct
VPVTIPHAT

SEQ ID NO: 24753 - protein, 8 aa, synthetic construct
LKLFTEYP

SEQ ID NO: 24754 - protein, 9 aa, synthetic construct
VPVPLGFNP

SEQ ID NO: 24755 - protein, 10 aa, synthetic construct
VFSLLHGAGL

SEQ ID NO: 24756 - protein, 11 aa, synthetic construct
PAIITSIMGNG

SEQ ID NO: 24757 - protein, 9 aa, synthetic construct
VPVSVEGYW

SEQ ID NO: 24758 - protein, 13 aa, synthetic construct
QATIAPVTVAVGG

SEQ ID NO: 24759 - protein, 10 aa, synthetic construct
YSDASLLPSV

SEQ ID NO: 24760 - protein, 9 aa, synthetic construct
VIPLALYDS

SEQ ID NO: 24761 - protein, 11 aa, synthetic construct
VPVWIPASFSS

SEQ ID NO: 24762 - protein, 11 aa, synthetic construct
VNNPHLSDVQF

SEQ ID NO: 24763 - protein, 9 aa, synthetic construct
PVLWRASIV

SEQ ID NO: 24764 - protein, 9 aa, synthetic construct
PWVPPSVRA

SEQ ID NO: 24765 - protein, 11 aa, synthetic construct
IAGERGAPGPV

SEQ ID NO: 24766 - protein, 9 aa, synthetic construct
FSLYNPAIV

SEQ ID NO: 24767 - protein, 10 aa, synthetic construct
VMLEMTPELG

SEQ ID NO: 24768 - protein, 9 aa, synthetic construct
PVYVGGNFV

SEQ ID NO: 24769 - protein, 10 aa, synthetic construct
YPVVGGKKMV

SEQ ID NO: 24770 - protein, 9 aa, synthetic construct
GDEEQKLRF

SEQ ID NO: 24771 - protein, 9 aa, synthetic construct
PVFHPVVPY

SEQ ID NO: 24772 - protein, 8 aa, synthetic construct
MRMAWPLM

SEQ ID NO: 24773 - protein, 9 aa, synthetic construct
PEMEGLSEF

SEQ ID NO: 24774 - protein, 9 aa, synthetic construct
TSCRRTMPV

SEQ ID NO: 24775 - protein, 9 aa, synthetic construct
LMLKTCPTV

SEQ ID NO: 24776 - protein, 10 aa, synthetic construct
VILSNMVSIS

SEQ ID NO: 24777 - protein, 8 aa, synthetic construct
ALNVLPTL

SEQ ID NO: 24778 - protein, 8 aa, synthetic construct
IQNDYLFQ

SEQ ID NO: 24779 - protein, 9 aa, synthetic construct
AGVAFSQLE

SEQ ID NO: 24780 - protein, 9 aa, synthetic construct
VQFPSIMLL

SEQ ID NO: 24781 - protein, 9 aa, synthetic construct
AVGAFVVFD

SEQ ID NO: 24782 - protein, 9 aa, synthetic construct
NIFVGFVIV

SEQ ID NO: 24783 - protein, 9 aa, synthetic construct
GLGSPDLNF

SEQ ID NO: 24784 - protein, 8 aa, synthetic construct
GNLEMLQV

SEQ ID NO: 24785 - protein, 9 aa, synthetic construct
VGEVLNILS

SEQ ID NO: 24786 - protein, 9 aa, synthetic construct
NLGLDIVTV

SEQ ID NO: 24787 - protein, 8 aa, synthetic construct
VQILHLLL

SEQ ID NO: 24788 - protein, 8 aa, synthetic construct
NLLPYPVL

SEQ ID NO: 24789 - protein, 8 aa, synthetic construct
VLKQLRIM

SEQ ID NO: 24790 - protein, 10 aa, synthetic construct
VGKVIGIAIM

SEQ ID NO: 24791 - protein, 10 aa, synthetic construct
LALQSHLEEL

SEQ ID NO: 24792 - protein, 8 aa, synthetic construct
KPKTLVVL

SEQ ID NO: 24793 - protein, 10 aa, synthetic construct
VQARQGTTIL

SEQ ID NO: 24794 - protein, 11 aa, synthetic construct
VAGKVTSSPSL

SEQ ID NO: 24795 - protein, 9 aa, synthetic construct
VLATGKTVL

SEQ ID NO: 24796 - protein, 9 aa, synthetic construct
LALLNTAIN

SEQ ID NO: 24797 - protein, 9 aa, synthetic construct
QVIVKEGGL

SEQ ID NO: 24798 - protein, 11 aa, synthetic construct
TAVGAILAGGL

SEQ ID NO: 24799 - protein, 9 aa, synthetic construct
QLLELNLTL

SEQ ID NO: 24800 - protein, 8 aa, synthetic construct
LTEIINSL

SEQ ID NO: 24801 - protein, 9 aa, synthetic construct
VAGLLPLLR

SEQ ID NO: 24802 - protein, 8 aa, synthetic construct
VQRLQSVI

SEQ ID NO: 24803 - protein, 8 aa, synthetic construct
VQFPSALI

SEQ ID NO: 24804 - protein, 9 aa, synthetic construct
ARYYARLIF

SEQ ID NO: 24805 - protein, 9 aa, synthetic construct
INQVILRTV

SEQ ID NO: 24806 - protein, 8 aa, synthetic construct
QQVSVLVI

SEQ ID NO: 24807 - protein, 8 aa, synthetic construct
LQNYKKQV

SEQ ID NO: 24808 - protein, 9 aa, synthetic construct
IRATERALN

SEQ ID NO: 24809 - protein, 9 aa, synthetic construct
LESRRTAQV

SEQ ID NO: 24810 - protein, 8 aa, synthetic construct
VKRINLCI

SEQ ID NO: 24811 - protein, 8 aa, synthetic construct
NRIELPVL

SEQ ID NO: 24812 - protein, 8 aa, synthetic construct
VLRINKAL

SEQ ID NO: 24813 - protein, 9 aa, synthetic construct
VAGIRVESL

SEQ ID NO: 24814 - protein, 9 aa, synthetic construct
EKTCILEIL

SEQ ID NO: 24815 - protein, 9 aa, synthetic construct
LGAVCTIIN

SEQ ID NO: 24816 - protein, 8 aa, synthetic construct
VTQTLLNL

SEQ ID NO: 24817 - protein, 9 aa, synthetic construct
LNTVLPVFP

SEQ ID NO: 24818 - protein, 9 aa, synthetic construct
VLVTQPLVM

SEQ ID NO: 24819 - protein, 8 aa, synthetic construct
VQVRTRSL

SEQ ID NO: 24820 - protein, 8 aa, synthetic construct
LVNILELH

SEQ ID NO: 24821 - protein, 9 aa, synthetic construct
TKPPVPVIS

SEQ ID NO: 24822 - protein, 8 aa, synthetic construct
VKTPLLLM

SEQ ID NO: 24823 - protein, 8 aa, synthetic construct
LNYIDLDL

SEQ ID NO: 24824 - protein, 10 aa, synthetic construct
VQEREGIDLC

SEQ ID NO: 24825 - protein, 8 aa, synthetic construct
VQQFKMQL

SEQ ID NO: 24826 - protein, 9 aa, synthetic construct
LNYIKPNHI

SEQ ID NO: 24827 - protein, 10 aa, synthetic construct
TTHQPTNLVL

SEQ ID NO: 24828 - protein, 10 aa, synthetic construct
FEKMIGGLYL

SEQ ID NO: 24829 - protein, 10 aa, synthetic construct
LGGSFAGLQP

SEQ ID NO: 24830 - protein, 11 aa, synthetic construct
GAEVPTGTNVL

SEQ ID NO: 24831 - protein, 10 aa, synthetic construct
GIDPVLRGLF

SEQ ID NO: 24832 - protein, 9 aa, synthetic construct
GIRVHLLLL

SEQ ID NO: 24833 - protein, 11 aa, synthetic construct
LLSLHHIASKI

SEQ ID NO: 24834 - protein, 12 aa, synthetic construct
LNRLVVTVHLSY

SEQ ID NO: 24835 - protein, 10 aa, synthetic construct
QNLFIIKKSL

SEQ ID NO: 24836 - protein, 10 aa, synthetic construct
DRLKFNKILR

SEQ ID NO: 24837 - protein, 9 aa, synthetic construct
IRVGILTLL

SEQ ID NO: 24838 - protein, 11 aa, synthetic construct
AGQLLGLAKEL

SEQ ID NO: 24839 - protein, 9 aa, synthetic construct
VKRLNLEVR

SEQ ID NO: 24840 - protein, 9 aa, synthetic construct
VILLPRSPK

SEQ ID NO: 24841 - protein, 9 aa, synthetic construct
RYPVLPLVC

SEQ ID NO: 24842 - protein, 10 aa, synthetic construct
LALSMLLPMQ

SEQ ID NO: 24843 - protein, 10 aa, synthetic construct
KQLASTIPQM

SEQ ID NO: 24844 - protein, 10 aa, synthetic construct
FVATMGMKCT

SEQ ID NO: 24845 - protein, 11 aa, synthetic construct
ASLRERDAALK

SEQ ID NO: 24846 - protein, 11 aa, synthetic construct
LLCRGLAVEAK

SEQ ID NO: 24847 - protein, 9 aa, synthetic construct
RVINHLLRE

SEQ ID NO: 24848 - protein, 9 aa, synthetic construct
LPYPISILK

SEQ ID NO: 24849 - protein, 10 aa, synthetic construct
TGKPGRAYGL

SEQ ID NO: 24850 - protein, 10 aa, synthetic construct
VRANARALRL

SEQ ID NO: 24851 - protein, 9 aa, synthetic construct
CLVLPLLVM

SEQ ID NO: 24852 - protein, 9 aa, synthetic construct
SNPEVRYEV

SEQ ID NO: 24853 - protein, 9 aa, synthetic construct
MVATWRVLL

SEQ ID NO: 24854 - protein, 9 aa, synthetic construct
VRGVLSMAL

SEQ ID NO: 24855 - protein, 8 aa, synthetic construct
LAVKHQVY

SEQ ID NO: 24856 - protein, 10 aa, synthetic construct
VRGSSRGLGQ

SEQ ID NO: 24857 - protein, 9 aa, synthetic construct
LQEAFHKVL

SEQ ID NO: 24858 - protein, 10 aa, synthetic construct
AGHVLTIMEV

SEQ ID NO: 24859 - protein, 9 aa, synthetic construct
LHRSLVGRV

SEQ ID NO: 24860 - protein, 9 aa, synthetic construct
RKTTSPVKL

SEQ ID NO: 24861 - protein, 9 aa, synthetic construct
YTPDLKMSY

SEQ ID NO: 24862 - protein, 10 aa, synthetic construct
MVSALVTMYS

SEQ ID NO: 24863 - protein, 11 aa, synthetic construct
AIKEHALKVPE

SEQ ID NO: 24864 - protein, 9 aa, synthetic construct
LLGQLLHLL

SEQ ID NO: 24865 - protein, 9 aa, synthetic construct
TEIQEWLCL

SEQ ID NO: 24866 - protein, 9 aa, synthetic construct
KSKVSRHLI

SEQ ID NO: 24867 - protein, 8 aa, synthetic construct
RREPRKII

SEQ ID NO: 24868 - protein, 11 aa, synthetic construct
LTSLDIPATYL

SEQ ID NO: 24869 - protein, 9 aa, synthetic construct
ACVFLLHYL

SEQ ID NO: 24870 - protein, 10 aa, synthetic construct
TMVTITGHYL

SEQ ID NO: 24871 - protein, 12 aa, synthetic construct
RVVAGAMVDALK

SEQ ID NO: 24872 - protein, 9 aa, synthetic construct
ISQAVVAQV

SEQ ID NO: 24873 - protein, 10 aa, synthetic construct
VASVAAGTSF

SEQ ID NO: 24874 - protein, 9 aa, synthetic construct
SLGPPSMPV

SEQ ID NO: 24875 - protein, 9 aa, synthetic construct
VICSRSELY

SEQ ID NO: 24876 - protein, 10 aa, synthetic construct
SAFANTDGGY

SEQ ID NO: 24877 - protein, 11 aa, synthetic construct
GMSASSVGSGY

SEQ ID NO: 24878 - protein, 9 aa, synthetic construct
YNSFPAYGY

SEQ ID NO: 24879 - protein, 10 aa, synthetic construct
SPDPLGEPLP

SEQ ID NO: 24880 - protein, 9 aa, synthetic construct
NTIDVVPTY

SEQ ID NO: 24881 - protein, 8 aa, synthetic construct
ELQDSKEM

SEQ ID NO: 24882 - protein, 10 aa, synthetic construct
VDADGDVISF

SEQ ID NO: 24883 - protein, 8 aa, synthetic construct
ITQPDVIY

SEQ ID NO: 24884 - protein, 8 aa, synthetic construct
VAEPEKIY

SEQ ID NO: 24885 - protein, 9 aa, synthetic construct
YTSYQNISV

SEQ ID NO: 24886 - protein, 8 aa, synthetic construct
GTTELFVK

SEQ ID NO: 24887 - protein, 9 aa, synthetic construct
LDLSDSVML

SEQ ID NO: 24888 - protein, 9 aa, synthetic construct
IEMEEASVY

SEQ ID NO: 24889 - protein, 8 aa, synthetic construct
WMLASLYN

SEQ ID NO: 24890 - protein, 12 aa, synthetic construct
MAALMTPGTGAP

SEQ ID NO: 24891 - protein, 8 aa, synthetic construct
MHVKEAGK

SEQ ID NO: 24892 - protein, 9 aa, synthetic construct
VSFLIKNKT

SEQ ID NO: 24893 - protein, 10 aa, synthetic construct
LNRAEADTSV

SEQ ID NO: 24894 - protein, 8 aa, synthetic construct
SVPGLFVL

SEQ ID NO: 24895 - protein, 10 aa, synthetic construct
PAIAAVHSSH

SEQ ID NO: 24896 - protein, 9 aa, synthetic construct
VSLAAMREP

SEQ ID NO: 24897 - protein, 9 aa, synthetic construct
VLSDRIAFL

SEQ ID NO: 24898 - protein, 7 aa, synthetic construct
EVKKEVA

SEQ ID NO: 24899 - protein, 10 aa, synthetic construct
AGGQQRLPQV

SEQ ID NO: 24900 - protein, 9 aa, synthetic construct
VEVPSFLSL

SEQ ID NO: 24901 - protein, 9 aa, synthetic construct
VSIMLSLLE

SEQ ID NO: 24902 - protein, 9 aa, synthetic construct
VSEVMGTTL

SEQ ID NO: 24903 - protein, 9 aa, synthetic construct
DAALVLSAL

SEQ ID NO: 24904 - protein, 8 aa, synthetic construct
VSPLIQRI

SEQ ID NO: 24905 - protein, 8 aa, synthetic construct
PYSVTNVF

SEQ ID NO: 24906 - protein, 9 aa, synthetic construct
VPSWIAPNL

SEQ ID NO: 24907 - protein, 9 aa, synthetic construct
ATIGEVQVF

SEQ ID NO: 24908 - protein, 10 aa, synthetic construct
VSDLGSGVGE

SEQ ID NO: 24909 - protein, 9 aa, synthetic construct
VSSSPQSEV

SEQ ID NO: 24910 - protein, 8 aa, synthetic construct
ESKDVNLD

SEQ ID NO: 24911 - protein, 8 aa, synthetic construct
STYIKKIV

SEQ ID NO: 24912 - protein, 8 aa, synthetic construct
VSMIKFWR

SEQ ID NO: 24913 - protein, 10 aa, synthetic construct
AFSHLSCLVY

SEQ ID NO: 24914 - protein, 8 aa, synthetic construct
ISENFYFD

SEQ ID NO: 24915 - protein, 10 aa, synthetic construct
NSEILLGLKY

SEQ ID NO: 24916 - protein, 10 aa, synthetic construct
SVIPQAPQYY

SEQ ID NO: 24917 - protein, 10 aa, synthetic construct
VTDCKPNGET

SEQ ID NO: 24918 - protein, 9 aa, synthetic construct
VTAIRPEDL

SEQ ID NO: 24919 - protein, 9 aa, synthetic construct
KDDEIIEYQ

SEQ ID NO: 24920 - protein, 10 aa, synthetic construct
VTLMSFSPAE

SEQ ID NO: 24921 - protein, 8 aa, synthetic construct
TVDSPLVL

SEQ ID NO: 24922 - protein, 9 aa, synthetic construct
LVQTTDYIY

SEQ ID NO: 24923 - protein, 8 aa, synthetic construct
LTDSPYVV

SEQ ID NO: 24924 - protein, 10 aa, synthetic construct
VTFAADEPVY

SEQ ID NO: 24925 - protein, 9 aa, synthetic construct
SLELACRDF

SEQ ID NO: 24926 - protein, 11 aa, synthetic construct
LSELTHFYEVD

SEQ ID NO: 24927 - protein, 9 aa, synthetic construct
TELMVSMGY

SEQ ID NO: 24928 - protein, 9 aa, synthetic construct
VTIKELDLY

SEQ ID NO: 24929 - protein, 9 aa, synthetic construct
VTFKTKSSY

SEQ ID NO: 24930 - protein, 9 aa, synthetic construct
LELLTDVLY

SEQ ID NO: 24931 - protein, 8 aa, synthetic construct
SLFLASHA

SEQ ID NO: 24932 - protein, 12 aa, synthetic construct
MQVSNPEAGETV

SEQ ID NO: 24933 - protein, 9 aa, synthetic construct
FSIKGQGTV

SEQ ID NO: 24934 - protein, 10 aa, synthetic construct
VLTRIGVMSL

SEQ ID NO: 24935 - protein, 9 aa, synthetic construct
VTILPHREN

SEQ ID NO: 24936 - protein, 10 aa, synthetic construct
VTLILISYGF

SEQ ID NO: 24937 - protein, 11 aa, synthetic construct
VTIIDAPGHRD

SEQ ID NO: 24938 - protein, 11 aa, synthetic construct
TVILNMVMGLS

SEQ ID NO: 24939 - protein, 10 aa, synthetic construct
SLLKELKSQG

SEQ ID NO: 24940 - protein, 11 aa, synthetic construct
SIISVLSQQAY

SEQ ID NO: 24941 - protein, 11 aa, synthetic construct
VTAERGRAVSY

SEQ ID NO: 24942 - protein, 10 aa, synthetic construct
VTREVLVETY

SEQ ID NO: 24943 - protein, 8 aa, synthetic construct
TVIHTGEK

SEQ ID NO: 24944 - protein, 8 aa, synthetic construct
VTLHSQVT

SEQ ID NO: 24945 - protein, 8 aa, synthetic construct
VTLSPRDP

SEQ ID NO: 24946 - protein, 10 aa, synthetic construct
VTISTPRLWL

SEQ ID NO: 24947 - protein, 10 aa, synthetic construct
LSPLSSDMLI

SEQ ID NO: 24948 - protein, 9 aa, synthetic construct
ISPSSHFRV

SEQ ID NO: 24949 - protein, 9 aa, synthetic construct
SLTPSSLSL

SEQ ID NO: 24950 - protein, 8 aa, synthetic construct
VTPEKASL

SEQ ID NO: 24951 - protein, 9 aa, synthetic construct
LSPVAASSI

SEQ ID NO: 24952 - protein, 11 aa, synthetic construct
VTEPTPARAPL

SEQ ID NO: 24953 - protein, 9 aa, synthetic construct
VSIPPGPLS

SEQ ID NO: 24954 - protein, 10 aa, synthetic construct
VTYGSACELR

SEQ ID NO: 24955 - protein, 9 aa, synthetic construct
VTPNDGFAK

SEQ ID NO: 24956 - protein, 8 aa, synthetic construct
QELCAKTV

SEQ ID NO: 24957 - protein, 10 aa, synthetic construct
VTGSADGSVR

SEQ ID NO: 24958 - protein, 10 aa, synthetic construct
VVAGRIRAVT

SEQ ID NO: 24959 - protein, 9 aa, synthetic construct
VADIELENV

SEQ ID NO: 24960 - protein, 9 aa, synthetic construct
VTPTISIVS

SEQ ID NO: 24961 - protein, 7 aa, synthetic construct
KTPTNYY

SEQ ID NO: 24962 - protein, 7 aa, synthetic construct
YVVQTNY

SEQ ID NO: 24963 - protein, 8 aa, synthetic construct
ASNFSVVY

SEQ ID NO: 24964 - protein, 8 aa, synthetic construct
LGVPELMV

SEQ ID NO: 24965 - protein, 9 aa, synthetic construct
GVLAVIDAY

SEQ ID NO: 24966 - protein, 9 aa, synthetic construct
VAVPIATYS

SEQ ID NO: 24967 - protein, 9 aa, synthetic construct
GVLPLASYT

SEQ ID NO: 24968 - protein, 9 aa, synthetic construct
VVLLMVPLN

SEQ ID NO: 24969 - protein, 10 aa, synthetic construct
VVYFARAPKS

SEQ ID NO: 24970 - protein, 11 aa, synthetic construct
HQLASISSPVV

SEQ ID NO: 24971 - protein, 11 aa, synthetic construct
HSLASSSSLIY

SEQ ID NO: 24972 - protein, 9 aa, synthetic construct
AAIELLMVL

SEQ ID NO: 24973 - protein, 9 aa, synthetic construct
EDLDRDLSY

SEQ ID NO: 24974 - protein, 10 aa, synthetic construct
LCMFGNTILY

SEQ ID NO: 24975 - protein, 9 aa, synthetic construct
DLVDLKDMY

SEQ ID NO: 24976 - protein, 8 aa, synthetic construct
FLQENVLY

SEQ ID NO: 24977 - protein, 8 aa, synthetic construct
YPMEHGVV

SEQ ID NO: 24978 - protein, 10 aa, synthetic construct
VVSMANNGPN

SEQ ID NO: 24979 - protein, 9 aa, synthetic construct
VVMELMAHG

SEQ ID NO: 24980 - protein, 9 aa, synthetic construct
VVDDEDLVD

SEQ ID NO: 24981 - protein, 11 aa, synthetic construct
SVGIYNLVQKA

SEQ ID NO: 24982 - protein, 8 aa, synthetic construct
VVQVKQFV

SEQ ID NO: 24983 - protein, 8 aa, synthetic construct
VVGLEGAI

SEQ ID NO: 24984 - protein, 7 aa, synthetic construct
VVQSTSL

SEQ ID NO: 24985 - protein, 10 aa, synthetic construct
DPGSHLTVPY

SEQ ID NO: 24986 - protein, 9 aa, synthetic construct
VVIGSGLTM

SEQ ID NO: 24987 - protein, 9 aa, synthetic construct
VVNALVGAI

SEQ ID NO: 24988 - protein, 10 aa, synthetic construct
VVINPYFGLG

SEQ ID NO: 24989 - protein, 8 aa, synthetic construct
VVEILRTL

SEQ ID NO: 24990 - protein, 9 aa, synthetic construct
VVKAGAPEL

SEQ ID NO: 24991 - protein, 9 aa, synthetic construct
KGSPPLSVV

SEQ ID NO: 24992 - protein, 11 aa, synthetic construct
VVLVKGGSKTK

SEQ ID NO: 24993 - protein, 7 aa, synthetic construct
VVLYKIY

SEQ ID NO: 24994 - protein, 9 aa, synthetic construct
VVIPAAPVP

SEQ ID NO: 24995 - protein, 9 aa, synthetic construct
ISDTNVVCL

SEQ ID NO: 24996 - protein, 9 aa, synthetic construct
IEPRKGTVV

SEQ ID NO: 24997 - protein, 10 aa, synthetic construct
VVPLLARGKA

SEQ ID NO: 24998 - protein, 9 aa, synthetic construct
VVLNGGASL

SEQ ID NO: 24999 - protein, 9 aa, synthetic construct
VVPATVAAF

SEQ ID NO: 25000 - protein, 12 aa, synthetic construct
SGPTVTKVVTVV

SEQ ID NO: 25001 - protein, 10 aa, synthetic construct
VVQDPFQKGL

SEQ ID NO: 25002 - protein, 10 aa, synthetic construct
KVAVTDEVTY

SEQ ID NO: 25003 - protein, 10 aa, synthetic construct
VVGVGSVRVL

SEQ ID NO: 25004 - protein, 9 aa, synthetic construct
ISSFVKLEM

SEQ ID NO: 25005 - protein, 9 aa, synthetic construct
VVTRVESPP

SEQ ID NO: 25006 - protein, 9 aa, synthetic construct
KTSAELHVV

SEQ ID NO: 25007 - protein, 11 aa, synthetic construct
VVVKSIPASSP

SEQ ID NO: 25008 - protein, 10 aa, synthetic construct
VVYCFMIAYG

SEQ ID NO: 25009 - protein, 10 aa, synthetic construct
YATKPMTYVV

SEQ ID NO: 25010 - protein, 12 aa, synthetic construct
LTFGKGTQLSVV

SEQ ID NO: 25011 - protein, 11 aa, synthetic construct
GTTLQWVGKVV

SEQ ID NO: 25012 - protein, 9 aa, synthetic construct
NKVVYVLLT

SEQ ID NO: 25013 - protein, 11 aa, synthetic construct
PHSRLLPSEVV

SEQ ID NO: 25014 - protein, 11 aa, synthetic construct
TAADAQSLLLL

SEQ ID NO: 25015 - protein, 11 aa, synthetic construct
VWLPSPPQIPC

SEQ ID NO: 25016 - protein, 9 aa, synthetic construct
VFSKLLEML

SEQ ID NO: 25017 - protein, 11 aa, synthetic construct
VYGLLALGMSL

SEQ ID NO: 25018 - protein, 10 aa, synthetic construct
VYCLVSYHVN

SEQ ID NO: 25019 - protein, 11 aa, synthetic construct
VGVSPHSHCFP

SEQ ID NO: 25020 - protein, 9 aa, synthetic construct
LDSFCNVSL

SEQ ID NO: 25021 - protein, 8 aa, synthetic construct
VYAIGEKF

SEQ ID NO: 25022 - protein, 9 aa, synthetic construct
IVYDIAQVN

SEQ ID NO: 25023 - protein, 9 aa, synthetic construct
IVVYIIDPF

SEQ ID NO: 25024 - protein, 10 aa, synthetic construct
LHLSGALDFP

SEQ ID NO: 25025 - protein, 8 aa, synthetic construct
VYENVGLI

SEQ ID NO: 25026 - protein, 12 aa, synthetic construct
YAAAPETGSGTG

SEQ ID NO: 25027 - protein, 10 aa, synthetic construct
VYDMVVRGNC

SEQ ID NO: 25028 - protein, 8 aa, synthetic construct
VYDVMIKA

SEQ ID NO: 25029 - protein, 10 aa, synthetic construct
VYDVTDQESF

SEQ ID NO: 25030 - protein, 10 aa, synthetic construct
VYDFVGLLVS

SEQ ID NO: 25031 - protein, 10 aa, synthetic construct
VYEKPEDPLN

SEQ ID NO: 25032 - protein, 11 aa, synthetic construct
PQMKNSPSFPF

SEQ ID NO: 25033 - protein, 10 aa, synthetic construct
VYIGPAGPFS

SEQ ID NO: 25034 - protein, 10 aa, synthetic construct
VYPVAGGPTF

SEQ ID NO: 25035 - protein, 9 aa, synthetic construct
IHLNVLELM

SEQ ID NO: 25036 - protein, 9 aa, synthetic construct
LSTHLKLFP

SEQ ID NO: 25037 - protein, 9 aa, synthetic construct
VYLISPDTK

SEQ ID NO: 25038 - protein, 9 aa, synthetic construct
YVIQDLATL

SEQ ID NO: 25039 - protein, 9 aa, synthetic construct
VYLMKNTME

SEQ ID NO: 25040 - protein, 9 aa, synthetic construct
VYLGDKNAL

SEQ ID NO: 25041 - protein, 10 aa, synthetic construct
VYGLATLLIL

SEQ ID NO: 25042 - protein, 10 aa, synthetic construct
VEREGGASPF

SEQ ID NO: 25043 - protein, 9 aa, synthetic construct
VEKMFGGKI

SEQ ID NO: 25044 - protein, 9 aa, synthetic construct
VYLVKRLFE

SEQ ID NO: 25045 - protein, 10 aa, synthetic construct
VYIRNTSKDE

SEQ ID NO: 25046 - protein, 11 aa, synthetic construct
MLDPEPYVGEM

SEQ ID NO: 25047 - protein, 11 aa, synthetic construct
PFGVYHVNLEG

SEQ ID NO: 25048 - protein, 10 aa, synthetic construct
MVLLVGGVYF

SEQ ID NO: 25049 - protein, 10 aa, synthetic construct
VYFEKLVLQG

SEQ ID NO: 25050 - protein, 9 aa, synthetic construct
FLSAKFLYV

SEQ ID NO: 25051 - protein, 10 aa, synthetic construct
QPTLVIMELM

SEQ ID NO: 25052 - protein, 11 aa, synthetic construct
AYGSTKDVAVY

SEQ ID NO: 25053 - protein, 9 aa, synthetic construct
VVSGLFPFF

SEQ ID NO: 25054 - protein, 9 aa, synthetic construct
IVTPIYYVF

SEQ ID NO: 25055 - protein, 12 aa, synthetic construct
KGSITSVQAIYV

SEQ ID NO: 25056 - protein, 10 aa, synthetic construct
EAVHDVLDLY

SEQ ID NO: 25057 - protein, 11 aa, synthetic construct
AAFATAHLLYV

SEQ ID NO: 25058 - protein, 9 aa, synthetic construct
IYSRLSVYY

SEQ ID NO: 25059 - protein, 11 aa, synthetic construct
QAAAIASTTIM

SEQ ID NO: 25060 - protein, 9 aa, synthetic construct
IESLNYSVY

SEQ ID NO: 25061 - protein, 10 aa, synthetic construct
VYSAAALFSL

SEQ ID NO: 25062 - protein, 9 aa, synthetic construct
LSRLQKLYV

SEQ ID NO: 25063 - protein, 9 aa, synthetic construct
VEKQWPTMI

SEQ ID NO: 25064 - protein, 9 aa, synthetic construct
NKMVVSMTL

SEQ ID NO: 25065 - protein, 10 aa, synthetic construct
FLTALAGALV

SEQ ID NO: 25066 - protein, 11 aa, synthetic construct
VYVDIPGAMDL

SEQ ID NO: 25067 - protein, 10 aa, synthetic construct
FVTAAHLTFP

SEQ ID NO: 25068 - protein, 10 aa, synthetic construct
VYVGVNIKGL

SEQ ID NO: 25069 - protein, 9 aa, synthetic construct
NTMGKVVFP

SEQ ID NO: 25070 - protein, 12 aa, synthetic construct
GPVPSSSQMMPF

SEQ ID NO: 25071 - protein, 8 aa, synthetic construct
MENVLSVY

SEQ ID NO: 25072 - protein, 8 aa, synthetic construct
VMSALRPL

SEQ ID NO: 25073 - protein, 9 aa, synthetic construct
VMQTLLSQV

SEQ ID NO: 25074 - protein, 7 aa, synthetic construct
VMDIYRT

SEQ ID NO: 25075 - protein, 10 aa, synthetic construct
MGAYVSLLEY

SEQ ID NO: 25076 - protein, 10 aa, synthetic construct
VPDGFCLPRL

SEQ ID NO: 25077 - protein, 8 aa, synthetic construct
VFTMPLLS

SEQ ID NO: 25078 - protein, 8 aa, synthetic construct
LLVSMVVL

SEQ ID NO: 25079 - protein, 10 aa, synthetic construct
GCSINPAIDI

SEQ ID NO: 25080 - protein, 10 aa, synthetic construct
SLFRGLALTV

SEQ ID NO: 25081 - protein, 9 aa, synthetic construct
VMGILDGSL

SEQ ID NO: 25082 - protein, 10 aa, synthetic construct
VEKGGKIIMP

SEQ ID NO: 25083 - protein, 10 aa, synthetic construct
TMNSSLSEPL

SEQ ID NO: 25084 - protein, 8 aa, synthetic construct
FPHSVLLL

SEQ ID NO: 25085 - protein, 8 aa, synthetic construct
LKLLARMV

SEQ ID NO: 25086 - protein, 8 aa, synthetic construct
VMNILSRL

SEQ ID NO: 25087 - protein, 8 aa, synthetic construct
VMPLRWHL

SEQ ID NO: 25088 - protein, 8 aa, synthetic construct
VAFDGFIL

SEQ ID NO: 25089 - protein, 9 aa, synthetic construct
ISYVPSTYL

SEQ ID NO: 25090 - protein, 9 aa, synthetic construct
SLFEAVYTL

SEQ ID NO: 25091 - protein, 9 aa, synthetic construct
MVSTPIGGL

SEQ ID NO: 25092 - protein, 10 aa, synthetic construct
DLSHNALETL

SEQ ID NO: 25093 - protein, 10 aa, synthetic construct
VLGKYMLPAH

SEQ ID NO: 25094 - protein, 9 aa, synthetic construct
VDGLDELKV

SEQ ID NO: 25095 - protein, 9 aa, synthetic construct
MTPQDLINY

SEQ ID NO: 25096 - protein, 9 aa, synthetic construct
LDTSQQNLY

SEQ ID NO: 25097 - protein, 9 aa, synthetic construct
WEDNGQKMP

SEQ ID NO: 25098 - protein, 9 aa, synthetic construct
WEEQVNSLP

SEQ ID NO: 25099 - protein, 9 aa, synthetic construct
WENAESLRP

SEQ ID NO: 25100 - protein, 10 aa, synthetic construct
VLPMGPEGLP

SEQ ID NO: 25101 - protein, 9 aa, synthetic construct
EWQLWIFNS

SEQ ID NO: 25102 - protein, 9 aa, synthetic construct
WFSIINSVV

SEQ ID NO: 25103 - protein, 9 aa, synthetic construct
TRITKKELF

SEQ ID NO: 25104 - protein, 9 aa, synthetic construct
WLKYLRTVL

SEQ ID NO: 25105 - protein, 10 aa, synthetic construct
WINTEGVALA

SEQ ID NO: 25106 - protein, 10 aa, synthetic construct
EGIVILMLRI

SEQ ID NO: 25107 - protein, 9 aa, synthetic construct
IWALELKTP

SEQ ID NO: 25108 - protein, 10 aa, synthetic construct
AVSGNEVNIS

SEQ ID NO: 25109 - protein, 8 aa, synthetic construct
LWEEGKEV

SEQ ID NO: 25110 - protein, 8 aa, synthetic construct
WIEVQVSE

SEQ ID NO: 25111 - protein, 9 aa, synthetic construct
WLEGDLGSL

SEQ ID NO: 25112 - protein, 8 aa, synthetic construct
IIPDGWFS

SEQ ID NO: 25113 - protein, 10 aa, synthetic construct
VIPPCTKVAI

SEQ ID NO: 25114 - protein, 9 aa, synthetic construct
WLPPMWKAA

SEQ ID NO: 25115 - protein, 10 aa, synthetic construct
VANTKPGGFT

SEQ ID NO: 25116 - protein, 10 aa, synthetic construct
MERKPCNVYE

SEQ ID NO: 25117 - protein, 10 aa, synthetic construct
WEVSESHFKY

SEQ ID NO: 25118 - protein, 11 aa, synthetic construct
YPMTPGTEPAL

SEQ ID NO: 25119 - protein, 10 aa, synthetic construct
IQKQTIGLAL

SEQ ID NO: 25120 - protein, 11 aa, synthetic construct
EEPDGVAISTY

SEQ ID NO: 25121 - protein, 9 aa, synthetic construct
AHPFDQIYY

SEQ ID NO: 25122 - protein, 10 aa, synthetic construct
MASPSSFTYY

SEQ ID NO: 25123 - protein, 9 aa, synthetic construct
QCLLCGLCY

SEQ ID NO: 25124 - protein, 14 aa, synthetic construct
SQGQSQGPGSGDTY

SEQ ID NO: 25125 - protein, 8 aa, synthetic construct
TWEESKQY

SEQ ID NO: 25126 - protein, 10 aa, synthetic construct
MALEINGVVY

SEQ ID NO: 25127 - protein, 9 aa, synthetic construct
ERDEKKNAD

SEQ ID NO: 25128 - protein, 9 aa, synthetic construct
LCEDLLSSV

SEQ ID NO: 25129 - protein, 10 aa, synthetic construct
IDSNSCIVSY

SEQ ID NO: 25130 - protein, 10 aa, synthetic construct
WVDVVHLALY

SEQ ID NO: 25131 - protein, 9 aa, synthetic construct
WVIKNVLSL

SEQ ID NO: 25132 - protein, 10 aa, synthetic construct
RELTALKGAL

SEQ ID NO: 25133 - protein, 9 aa, synthetic construct
REEKVKAVL

SEQ ID NO: 25134 - protein, 9 aa, synthetic construct
ERLVEKTEY

SEQ ID NO: 25135 - protein, 9 aa, synthetic construct
VWPTAWASL

SEQ ID NO: 25136 - protein, 10 aa, synthetic construct
TRATLHSGEL

SEQ ID NO: 25137 - protein, 10 aa, synthetic construct
GMHRLSPASL

SEQ ID NO: 25138 - protein, 9 aa, synthetic construct
EGMINLRIP

SEQ ID NO: 25139 - protein, 9 aa, synthetic construct
LGECSKLKL

SEQ ID NO: 25140 - protein, 11 aa, synthetic construct
GLEAYIQVCES

SEQ ID NO: 25141 - protein, 9 aa, synthetic construct
IQYSVTPSY

SEQ ID NO: 25142 - protein, 9 aa, synthetic construct
QPPNFPQGL

SEQ ID NO: 25143 - protein, 10 aa, synthetic construct
SKSQRYSGAY

SEQ ID NO: 25144 - protein, 9 aa, synthetic construct
ESKAMNLYE

SEQ ID NO: 25145 - protein, 9 aa, synthetic construct
SVFASEFEE

SEQ ID NO: 25146 - protein, 10 aa, synthetic construct
SFCGTSEIDF

SEQ ID NO: 25147 - protein, 11 aa, synthetic construct
VENNISPMVTL

SEQ ID NO: 25148 - protein, 9 aa, synthetic construct
YDESQFYIG

SEQ ID NO: 25149 - protein, 9 aa, synthetic construct
SVPGDSFFY

SEQ ID NO: 25150 - protein, 9 aa, synthetic construct
FSDSMKATF

SEQ ID NO: 25151 - protein, 8 aa, synthetic construct
YADIKCKS

SEQ ID NO: 25152 - protein, 8 aa, synthetic construct
FSDPVYKE

SEQ ID NO: 25153 - protein, 9 aa, synthetic construct
LSHPEAPSF

SEQ ID NO: 25154 - protein, 8 aa, synthetic construct
YAEGVRVL

SEQ ID NO: 25155 - protein, 9 aa, synthetic construct
YALMKANPL

SEQ ID NO: 25156 - protein, 8 aa, synthetic construct
AYFLLHKE

SEQ ID NO: 25157 - protein, 9 aa, synthetic construct
SFFTWFMVI

SEQ ID NO: 25158 - protein, 10 aa, synthetic construct
YAFNMKSVVS

SEQ ID NO: 25159 - protein, 10 aa, synthetic construct
SFFSASKIIV

SEQ ID NO: 25160 - protein, 11 aa, synthetic construct
EQMETPQKEAY

SEQ ID NO: 25161 - protein, 11 aa, synthetic construct
TRSSALCSLGY

SEQ ID NO: 25162 - protein, 9 aa, synthetic construct
FSFHDNTAF

SEQ ID NO: 25163 - protein, 9 aa, synthetic construct
YALTVVWLL

SEQ ID NO: 25164 - protein, 9 aa, synthetic construct
SFIDVTWTH

SEQ ID NO: 25165 - protein, 10 aa, synthetic construct
FSLAHDGPVY

SEQ ID NO: 25166 - protein, 9 aa, synthetic construct
LSFLDDVIP

SEQ ID NO: 25167 - protein, 9 aa, synthetic construct
YAILKTETL

SEQ ID NO: 25168 - protein, 9 aa, synthetic construct
GHQYFGIEF

SEQ ID NO: 25169 - protein, 9 aa, synthetic construct
PNTTEFLEF

SEQ ID NO: 25170 - protein, 10 aa, synthetic construct
LLKVTLEAAY

SEQ ID NO: 25171 - protein, 9 aa, synthetic construct
YAKLGRNKN

SEQ ID NO: 25172 - protein, 9 aa, synthetic construct
LSSMRLPLL

SEQ ID NO: 25173 - protein, 8 aa, synthetic construct
YALAKADF

SEQ ID NO: 25174 - protein, 9 aa, synthetic construct
VFTDAGLTL

SEQ ID NO: 25175 - protein, 10 aa, synthetic construct
AYLDTFKDSR

SEQ ID NO: 25176 - protein, 10 aa, synthetic construct
FSLAYEELLQ

SEQ ID NO: 25177 - protein, 10 aa, synthetic construct
FSLGESFGSR

SEQ ID NO: 25178 - protein, 11 aa, synthetic construct
GSARSGPVTVY

SEQ ID NO: 25179 - protein, 8 aa, synthetic construct
SFQRHMIV

SEQ ID NO: 25180 - protein, 9 aa, synthetic construct
FSLAHPLLR

SEQ ID NO: 25181 - protein, 9 aa, synthetic construct
FSLQEAETY

SEQ ID NO: 25182 - protein, 10 aa, synthetic construct
YALLAADDDS

SEQ ID NO: 25183 - protein, 9 aa, synthetic construct
APTSGYQEF

SEQ ID NO: 25184 - protein, 10 aa, synthetic construct
YAGLPSINSL

SEQ ID NO: 25185 - protein, 9 aa, synthetic construct
AYPSAPLPA

SEQ ID NO: 25186 - protein, 9 aa, synthetic construct
FSLGDFSHL

SEQ ID NO: 25187 - protein, 9 aa, synthetic construct
PHALQGQFL

SEQ ID NO: 25188 - protein, 9 aa, synthetic construct
YAGIMLTKN

SEQ ID NO: 25189 - protein, 9 aa, synthetic construct
KNMQSSHAY

SEQ ID NO: 25190 - protein, 11 aa, synthetic construct
YAILGSDYSFT

SEQ ID NO: 25191 - protein, 9 aa, synthetic construct
SHVHCSIIY

SEQ ID NO: 25192 - protein, 10 aa, synthetic construct
VAFVSHRGPL

SEQ ID NO: 25193 - protein, 10 aa, synthetic construct
VGRDRGLPRG

SEQ ID NO: 25194 - protein, 9 aa, synthetic construct
GNRSWLEEF

SEQ ID NO: 25195 - protein, 8 aa, synthetic construct
ETYCNSFF

SEQ ID NO: 25196 - protein, 9 aa, synthetic construct
VPYASVAFY

SEQ ID NO: 25197 - protein, 9 aa, synthetic construct
FSSSVGYPG

SEQ ID NO: 25198 - protein, 9 aa, synthetic construct
DYAEVTVDF

SEQ ID NO: 25199 - protein, 9 aa, synthetic construct
FTSFISLYN

SEQ ID NO: 25200 - protein, 10 aa, synthetic construct
FSLMPRAMAI

SEQ ID NO: 25201 - protein, 11 aa, synthetic construct
YTPTIVPSSAS

SEQ ID NO: 25202 - protein, 10 aa, synthetic construct
EPPSPVAEFS

SEQ ID NO: 25203 - protein, 10 aa, synthetic construct
SFFETEGCGK

SEQ ID NO: 25204 - protein, 8 aa, synthetic construct
SFRCDFYL

SEQ ID NO: 25205 - protein, 11 aa, synthetic construct
YQTNDPQELAL

SEQ ID NO: 25206 - protein, 12 aa, synthetic construct
AAHSDGHHYLAL

SEQ ID NO: 25207 - protein, 8 aa, synthetic construct
FSYRHPLL

SEQ ID NO: 25208 - protein, 9 aa, synthetic construct
YAYDAKIEI

SEQ ID NO: 25209 - protein, 9 aa, synthetic construct
YAKCENEPF

SEQ ID NO: 25210 - protein, 9 aa, synthetic construct
YCAQHLTSP

SEQ ID NO: 25211 - protein, 9 aa, synthetic construct
IDLNGFWTY

SEQ ID NO: 25212 - protein, 8 aa, synthetic construct
YCTPCGLL

SEQ ID NO: 25213 - protein, 8 aa, synthetic construct
LLTGHWYC

SEQ ID NO: 25214 - protein, 9 aa, synthetic construct
YCPGMDVAL

SEQ ID NO: 25215 - protein, 9 aa, synthetic construct
MLTINTNYC

SEQ ID NO: 25216 - protein, 8 aa, synthetic construct
VDTCYSFW

SEQ ID NO: 25217 - protein, 11 aa, synthetic construct
YCVNSVSDYGD

SEQ ID NO: 25218 - protein, 11 aa, synthetic construct
EGCAAPTVIVS

SEQ ID NO: 25219 - protein, 9 aa, synthetic construct
DYAETVHQL

SEQ ID NO: 25220 - protein, 11 aa, synthetic construct
RVDGPSLEAEM

SEQ ID NO: 25221 - protein, 13 aa, synthetic construct
SQGLAGGQLWGGC

SEQ ID NO: 25222 - protein, 8 aa, synthetic construct
YDVPPRLS

SEQ ID NO: 25223 - protein, 8 aa, synthetic construct
YDKILAHS

SEQ ID NO: 25224 - protein, 8 aa, synthetic construct
EKSEFSAL

SEQ ID NO: 25225 - protein, 9 aa, synthetic construct
ASFRYPQDY

SEQ ID NO: 25226 - protein, 10 aa, synthetic construct
MMFGSTAIAL

SEQ ID NO: 25227 - protein, 10 aa, synthetic construct
YDAYPHPPLP

SEQ ID NO: 25228 - protein, 10 aa, synthetic construct
DYMPLHAPLP

SEQ ID NO: 25229 - protein, 10 aa, synthetic construct
YDQRHGSPLP

SEQ ID NO: 25230 - protein, 9 aa, synthetic construct
HGSEEFQIH

SEQ ID NO: 25231 - protein, 8 aa, synthetic construct
DYPEASAA

SEQ ID NO: 25232 - protein, 8 aa, synthetic construct
KEEMESAP

SEQ ID NO: 25233 - protein, 11 aa, synthetic construct
TAASSNGSGQP

SEQ ID NO: 25234 - protein, 10 aa, synthetic construct
SVGMETAEPG

SEQ ID NO: 25235 - protein, 8 aa, synthetic construct
EMLTSKLL

SEQ ID NO: 25236 - protein, 9 aa, synthetic construct
NDPDLLPNI

SEQ ID NO: 25237 - protein, 8 aa, synthetic construct
YEAFVIYS

SEQ ID NO: 25238 - protein, 9 aa, synthetic construct
QIVEFSLTP

SEQ ID NO: 25239 - protein, 10 aa, synthetic construct
IYEGVGSSKI

SEQ ID NO: 25240 - protein, 9 aa, synthetic construct
VYEAMAFAE

SEQ ID NO: 25241 - protein, 8 aa, synthetic construct
YEDLKAQS

SEQ ID NO: 25242 - protein, 11 aa, synthetic construct
AYEDIKTLEAE

SEQ ID NO: 25243 - protein, 9 aa, synthetic construct
TSTMDLLPP

SEQ ID NO: 25244 - protein, 9 aa, synthetic construct
AEYEAMAAI

SEQ ID NO: 25245 - protein, 8 aa, synthetic construct
YEEFIPTP

SEQ ID NO: 25246 - protein, 10 aa, synthetic construct
LYEEIGRGSK

SEQ ID NO: 25247 - protein, 10 aa, synthetic construct
YEQAMKVSVL

SEQ ID NO: 25248 - protein, 10 aa, synthetic construct
EYSSHIFQDS

SEQ ID NO: 25249 - protein, 10 aa, synthetic construct
LFAASRKEYE

SEQ ID NO: 25250 - protein, 11 aa, synthetic construct
KPEMFAELLQA

SEQ ID NO: 25251 - protein, 9 aa, synthetic construct
EYFKNELEA

SEQ ID NO: 25252 - protein, 10 aa, synthetic construct
GRGMHGAGVT

SEQ ID NO: 25253 - protein, 9 aa, synthetic construct
YEVEKTLGI

SEQ ID NO: 25254 - protein, 9 aa, synthetic construct
YFRLQLLPC

SEQ ID NO: 25255 - protein, 9 aa, synthetic construct
NIYELNPNK

SEQ ID NO: 25256 - protein, 9 aa, synthetic construct
LEYVAINDP

SEQ ID NO: 25257 - protein, 9 aa, synthetic construct
YEKLGEKAF

SEQ ID NO: 25258 - protein, 11 aa, synthetic construct
AGPGRAQRTEA

SEQ ID NO: 25259 - protein, 9 aa, synthetic construct
EYKRGFSRA

SEQ ID NO: 25260 - protein, 8 aa, synthetic construct
YEETKIKL

SEQ ID NO: 25261 - protein, 10 aa, synthetic construct
EYMKVQTEIA

SEQ ID NO: 25262 - protein, 9 aa, synthetic construct
EYLQSKNKY

SEQ ID NO: 25263 - protein, 10 aa, synthetic construct
YELDKSFRLT

SEQ ID NO: 25264 - protein, 9 aa, synthetic construct
YEPKPTQEP

SEQ ID NO: 25265 - protein, 9 aa, synthetic construct
MRMTPTWSL

SEQ ID NO: 25266 - protein, 9 aa, synthetic construct
YELINFSIV

SEQ ID NO: 25267 - protein, 10 aa, synthetic construct
TPDLENFIEA

SEQ ID NO: 25268 - protein, 9 aa, synthetic construct
YEMMLPSEA

SEQ ID NO: 25269 - protein, 9 aa, synthetic construct
YENLNIVEQ

SEQ ID NO: 25270 - protein, 10 aa, synthetic construct
YENVLSSRGP

SEQ ID NO: 25271 - protein, 8 aa, synthetic construct
ACQKQYEL

SEQ ID NO: 25272 - protein, 9 aa, synthetic construct
YQRDELLAA

SEQ ID NO: 25273 - protein, 11 aa, synthetic construct
VFLESAAGPVP

SEQ ID NO: 25274 - protein, 9 aa, synthetic construct
WLNYDIYIP

SEQ ID NO: 25275 - protein, 10 aa, synthetic construct
LSHPPSFTTV

SEQ ID NO: 25276 - protein, 12 aa, synthetic construct
VVSRIMGRGGCN

SEQ ID NO: 25277 - protein, 9 aa, synthetic construct
EYTLTIQAT

SEQ ID NO: 25278 - protein, 9 aa, synthetic construct
EYNGIDLPV

SEQ ID NO: 25279 - protein, 9 aa, synthetic construct
YNHRPLTEP

SEQ ID NO: 25280 - protein, 11 aa, synthetic construct
PANPAPITQTV

SEQ ID NO: 25281 - protein, 12 aa, synthetic construct
AAFAEVTTVTVA

SEQ ID NO: 25282 - protein, 10 aa, synthetic construct
YEQMNGPVAG

SEQ ID NO: 25283 - protein, 9 aa, synthetic construct
AYMPPTSEA

SEQ ID NO: 25284 - protein, 11 aa, synthetic construct
QARSSSYSGEY

SEQ ID NO: 25285 - protein, 9 aa, synthetic construct
EYRNQFPEI

SEQ ID NO: 25286 - protein, 11 aa, synthetic construct
YEVCENVGLLP

SEQ ID NO: 25287 - protein, 10 aa, synthetic construct
QNLPTEFGVI

SEQ ID NO: 25288 - protein, 10 aa, synthetic construct
STTMYPGIAL

SEQ ID NO: 25289 - protein, 10 aa, synthetic construct
SYYGSYYGGL

SEQ ID NO: 25290 - protein, 9 aa, synthetic construct
EYYSREAPN

SEQ ID NO: 25291 - protein, 9 aa, synthetic construct
YAAEMDNPL

SEQ ID NO: 25292 - protein, 9 aa, synthetic construct
EYMLSKCLT

SEQ ID NO: 25293 - protein, 10 aa, synthetic construct
YFVGLLTATV

SEQ ID NO: 25294 - protein, 8 aa, synthetic construct
YVAEFLEW

SEQ ID NO: 25295 - protein, 9 aa, synthetic construct
LDYALEDPH

SEQ ID NO: 25296 - protein, 9 aa, synthetic construct
LYMDTTEDF

SEQ ID NO: 25297 - protein, 9 aa, synthetic construct
KNGYFDDSI

SEQ ID NO: 25298 - protein, 8 aa, synthetic construct
DFYELVEP

SEQ ID NO: 25299 - protein, 8 aa, synthetic construct
KHTTDFYF

SEQ ID NO: 25300 - protein, 10 aa, synthetic construct
FYDLCELFRT

SEQ ID NO: 25301 - protein, 8 aa, synthetic construct
CSWNHYNM

SEQ ID NO: 25302 - protein, 9 aa, synthetic construct
VQSVEIDMF

SEQ ID NO: 25303 - protein, 9 aa, synthetic construct
YFDSVDICK

SEQ ID NO: 25304 - protein, 9 aa, synthetic construct
LCFNLFTML

SEQ ID NO: 25305 - protein, 9 aa, synthetic construct
YFFVANKYW

SEQ ID NO: 25306 - protein, 8 aa, synthetic construct
FYHKQTHY

SEQ ID NO: 25307 - protein, 12 aa, synthetic construct
TQEGARPGMVLS

SEQ ID NO: 25308 - protein, 10 aa, synthetic construct
YFLGIAESLL

SEQ ID NO: 25309 - protein, 10 aa, synthetic construct
YFTPILGAAI

SEQ ID NO: 25310 - protein, 10 aa, synthetic construct
YFILSNLNVF

SEQ ID NO: 25311 - protein, 10 aa, synthetic construct
YGAVVYQDGF

SEQ ID NO: 25312 - protein, 12 aa, synthetic construct
AESRFNDAAYYY

SEQ ID NO: 25313 - protein, 9 aa, synthetic construct
GSFVNGFNS

SEQ ID NO: 25314 - protein, 7 aa, synthetic construct
YQKELNK

SEQ ID NO: 25315 - protein, 9 aa, synthetic construct
LYGASVANK

SEQ ID NO: 25316 - protein, 8 aa, synthetic construct
RNQSLPVI

SEQ ID NO: 25317 - protein, 8 aa, synthetic construct
IYQKVMEI

SEQ ID NO: 25318 - protein, 9 aa, synthetic construct
YGLAKQFTI

SEQ ID NO: 25319 - protein, 9 aa, synthetic construct
VFSINGLMI

SEQ ID NO: 25320 - protein, 10 aa, synthetic construct
YTSPIKALSN

SEQ ID NO: 25321 - protein, 10 aa, synthetic construct
SGYSQSYGGY

SEQ ID NO: 25322 - protein, 8 aa, synthetic construct
YGVTDLRG

SEQ ID NO: 25323 - protein, 8 aa, synthetic construct
YGSILYRL

SEQ ID NO: 25324 - protein, 8 aa, synthetic construct
AMMDKRLI

SEQ ID NO: 25325 - protein, 10 aa, synthetic construct
YGTGPVSSIL

SEQ ID NO: 25326 - protein, 9 aa, synthetic construct
YMPAGGRLL

SEQ ID NO: 25327 - protein, 8 aa, synthetic construct
YHPNDIEK

SEQ ID NO: 25328 - protein, 8 aa, synthetic construct
YHCPLEHL

SEQ ID NO: 25329 - protein, 10 aa, synthetic construct
YLASCGILMS

SEQ ID NO: 25330 - protein, 9 aa, synthetic construct
PHELSENFF

SEQ ID NO: 25331 - protein, 10 aa, synthetic construct
ENMGAHLNAY

SEQ ID NO: 25332 - protein, 8 aa, synthetic construct
VLDEYFSR

SEQ ID NO: 25333 - protein, 9 aa, synthetic construct
YITELSDMV

SEQ ID NO: 25334 - protein, 9 aa, synthetic construct
YIDKLPESI

SEQ ID NO: 25335 - protein, 10 aa, synthetic construct
YLDAFWGDYL

SEQ ID NO: 25336 - protein, 9 aa, synthetic construct
YLKALEGFI

SEQ ID NO: 25337 - protein, 9 aa, synthetic construct
LYNSLGFVI

SEQ ID NO: 25338 - protein, 11 aa, synthetic construct
YLNGGRPEDGT

SEQ ID NO: 25339 - protein, 10 aa, synthetic construct
IYFKSLDGEF

SEQ ID NO: 25340 - protein, 8 aa, synthetic construct
YLHHKYII

SEQ ID NO: 25341 - protein, 9 aa, synthetic construct
AEGRVQGAL

SEQ ID NO: 25342 - protein, 9 aa, synthetic construct
YLIDLMHDK

SEQ ID NO: 25343 - protein, 9 aa, synthetic construct
YLFIFITIL

SEQ ID NO: 25344 - protein, 10 aa, synthetic construct
IFSGLNLGLM

SEQ ID NO: 25345 - protein, 9 aa, synthetic construct
LYPGPPLSL

SEQ ID NO: 25346 - protein, 8 aa, synthetic construct
IYLTRVLF

SEQ ID NO: 25347 - protein, 10 aa, synthetic construct
YLKLSPLVRG

SEQ ID NO: 25348 - protein, 8 aa, synthetic construct
IYKQTKLF

SEQ ID NO: 25349 - protein, 8 aa, synthetic construct
LYLPPTKK

SEQ ID NO: 25350 - protein, 10 aa, synthetic construct
YLNNLGSVAI

SEQ ID NO: 25351 - protein, 8 aa, synthetic construct
RLMEPIYL

SEQ ID NO: 25352 - protein, 8 aa, synthetic construct
YLFNWNGF

SEQ ID NO: 25353 - protein, 11 aa, synthetic construct
IYATGALAKAV

SEQ ID NO: 25354 - protein, 8 aa, synthetic construct
YLVQHTLE

SEQ ID NO: 25355 - protein, 9 aa, synthetic construct
YVLPIISFI

SEQ ID NO: 25356 - protein, 9 aa, synthetic construct
YIYEEQIKT

SEQ ID NO: 25357 - protein, 10 aa, synthetic construct
YLYEKLATGE

SEQ ID NO: 25358 - protein, 9 aa, synthetic construct
KAYLFMLLY

SEQ ID NO: 25359 - protein, 10 aa, synthetic construct
ILFGYATTVI

SEQ ID NO: 25360 - protein, 9 aa, synthetic construct
YKKAAAFVL

SEQ ID NO: 25361 - protein, 9 aa, synthetic construct
YKPGVEAIR

SEQ ID NO: 25362 - protein, 9 aa, synthetic construct
TEKMVLVFL

SEQ ID NO: 25363 - protein, 8 aa, synthetic construct
SKYPVLLL

SEQ ID NO: 25364 - protein, 10 aa, synthetic construct
YVTATFPYIM

SEQ ID NO: 25365 - protein, 9 aa, synthetic construct
YLADFLLTK

SEQ ID NO: 25366 - protein, 9 aa, synthetic construct
VLMSSAPTL

SEQ ID NO: 25367 - protein, 9 aa, synthetic construct
YLAPRHSLL

SEQ ID NO: 25368 - protein, 9 aa, synthetic construct
LYTPTSFLP

SEQ ID NO: 25369 - protein, 9 aa, synthetic construct
YLKGVASLF

SEQ ID NO: 25370 - protein, 9 aa, synthetic construct
VYAESVILT

SEQ ID NO: 25371 - protein, 8 aa, synthetic construct
FHHQCIQY

SEQ ID NO: 25372 - protein, 10 aa, synthetic construct
YLDSVTNKDS

SEQ ID NO: 25373 - protein, 9 aa, synthetic construct
YLDERYLSM

SEQ ID NO: 25374 - protein, 10 aa, synthetic construct
RSNEGADFDY

SEQ ID NO: 25375 - protein, 9 aa, synthetic construct
LDIGQVYYY

SEQ ID NO: 25376 - protein, 8 aa, synthetic construct
YIEKVRFL

SEQ ID NO: 25377 - protein, 9 aa, synthetic construct
LSKYTPLKY

SEQ ID NO: 25378 - protein, 8 aa, synthetic construct
YLDRGILK

SEQ ID NO: 25379 - protein, 8 aa, synthetic construct
LYDKLGRL

SEQ ID NO: 25380 - protein, 9 aa, synthetic construct
LYSNPSVFV

SEQ ID NO: 25381 - protein, 8 aa, synthetic construct
IYDPVHFK

SEQ ID NO: 25382 - protein, 9 aa, synthetic construct
YIDDTVKHK

SEQ ID NO: 25383 - protein, 9 aa, synthetic construct
YIEDMENLY

SEQ ID NO: 25384 - protein, 9 aa, synthetic construct
EENMHDLQY

SEQ ID NO: 25385 - protein, 9 aa, synthetic construct
YLEEIEQHL

SEQ ID NO: 25386 - protein, 9 aa, synthetic construct
CSKLFIYLY

SEQ ID NO: 25387 - protein, 9 aa, synthetic construct
YLEQLRQQE

SEQ ID NO: 25388 - protein, 9 aa, synthetic construct
QGSIELFYI

SEQ ID NO: 25389 - protein, 9 aa, synthetic construct
YIIRIYQEL

SEQ ID NO: 25390 - protein, 10 aa, synthetic construct
YIFVNGKEIK

SEQ ID NO: 25391 - protein, 9 aa, synthetic construct
LFYLAVGIM

SEQ ID NO: 25392 - protein, 8 aa, synthetic construct
YLLVNNRI

SEQ ID NO: 25393 - protein, 8 aa, synthetic construct
TVLQGYTI

SEQ ID NO: 25394 - protein, 8 aa, synthetic construct
YLGQVTLT

SEQ ID NO: 25395 - protein, 9 aa, synthetic construct
IINICLKYL

SEQ ID NO: 25396 - protein, 9 aa, synthetic construct
LYHTVAQMF

SEQ ID NO: 25397 - protein, 12 aa, synthetic construct
SIPEESQDPAAL

SEQ ID NO: 25398 - protein, 12 aa, synthetic construct
QLPWEDGSSAAL

SEQ ID NO: 25399 - protein, 9 aa, synthetic construct
WRASMKYLV

SEQ ID NO: 25400 - protein, 10 aa, synthetic construct
VVRNASAESV

SEQ ID NO: 25401 - protein, 11 aa, synthetic construct
YLLNGNLAISA

SEQ ID NO: 25402 - protein, 9 aa, synthetic construct
YLLIPLLER

SEQ ID NO: 25403 - protein, 9 aa, synthetic construct
YDLILKEEV

SEQ ID NO: 25404 - protein, 11 aa, synthetic construct
ALIVKSAQIVV

SEQ ID NO: 25405 - protein, 8 aa, synthetic construct
YIFRIRKK

SEQ ID NO: 25406 - protein, 9 aa, synthetic construct
YVKARLKVF

SEQ ID NO: 25407 - protein, 8 aa, synthetic construct
YLIKDIRF

SEQ ID NO: 25408 - protein, 8 aa, synthetic construct
LKYVREIF

SEQ ID NO: 25409 - protein, 10 aa, synthetic construct
YIGPTLAREL

SEQ ID NO: 25410 - protein, 9 aa, synthetic construct
YLHSLDLIY

SEQ ID NO: 25411 - protein, 12 aa, synthetic construct
VSKPLVPNAALL

SEQ ID NO: 25412 - protein, 9 aa, synthetic construct
YLLKRIKKC

SEQ ID NO: 25413 - protein, 9 aa, synthetic construct
ILSFPLVLH

SEQ ID NO: 25414 - protein, 9 aa, synthetic construct
LITKNTVHL

SEQ ID NO: 25415 - protein, 9 aa, synthetic construct
ILYILVPSV

SEQ ID NO: 25416 - protein, 12 aa, synthetic construct
TASNNISAANDS

SEQ ID NO: 25417 - protein, 10 aa, synthetic construct
YISFFGLGAV

SEQ ID NO: 25418 - protein, 8 aa, synthetic construct
NLSPQLYL

SEQ ID NO: 25419 - protein, 9 aa, synthetic construct
YDFLYDPLF

SEQ ID NO: 25420 - protein, 10 aa, synthetic construct
YLHHVGWFPF

SEQ ID NO: 25421 - protein, 9 aa, synthetic construct
ASHMILSYL

SEQ ID NO: 25422 - protein, 10 aa, synthetic construct
IYPEICMLEL

SEQ ID NO: 25423 - protein, 12 aa, synthetic construct
YLGRGQDLMMSL

SEQ ID NO: 25424 - protein, 8 aa, synthetic construct
YIPIVHAL

SEQ ID NO: 25425 - protein, 9 aa, synthetic construct
ASNGNLLYI

SEQ ID NO: 25426 - protein, 10 aa, synthetic construct
TLMAKIKSTM

SEQ ID NO: 25427 - protein, 9 aa, synthetic construct
YLSDIAYKS

SEQ ID NO: 25428 - protein, 9 aa, synthetic construct
AVYTETGLL

SEQ ID NO: 25429 - protein, 9 aa, synthetic construct
VEDTLYQGL

SEQ ID NO: 25430 - protein, 9 aa, synthetic construct
VFTTQDVIY

SEQ ID NO: 25431 - protein, 9 aa, synthetic construct
NIYTSEVVS

SEQ ID NO: 25432 - protein, 10 aa, synthetic construct
IYMNGTMSQV

SEQ ID NO: 25433 - protein, 9 aa, synthetic construct
LTYAELELI

SEQ ID NO: 25434 - protein, 9 aa, synthetic construct
LEYLTAEIL

SEQ ID NO: 25435 - protein, 11 aa, synthetic construct
LYTSSAFPSGK

SEQ ID NO: 25436 - protein, 11 aa, synthetic construct
LYYGPDLPRIY

SEQ ID NO: 25437 - protein, 9 aa, synthetic construct
YIILPTITI

SEQ ID NO: 25438 - protein, 9 aa, synthetic construct
ILPTILYLT

SEQ ID NO: 25439 - protein, 8 aa, synthetic construct
LYVIHTCV

SEQ ID NO: 25440 - protein, 8 aa, synthetic construct
YLKRRQVK

SEQ ID NO: 25441 - protein, 10 aa, synthetic construct
YLTDANADRL

SEQ ID NO: 25442 - protein, 9 aa, synthetic construct
LYDLNHTLY

SEQ ID NO: 25443 - protein, 9 aa, synthetic construct
YLKSLYILK

SEQ ID NO: 25444 - protein, 9 aa, synthetic construct
LSYLYSELS

SEQ ID NO: 25445 - protein, 8 aa, synthetic construct
VMFLAILL

SEQ ID NO: 25446 - protein, 8 aa, synthetic construct
IDDQDYLY

SEQ ID NO: 25447 - protein, 8 aa, synthetic construct
YNLLKRNL

SEQ ID NO: 25448 - protein, 9 aa, synthetic construct
QPPPPLPFG

SEQ ID NO: 25449 - protein, 8 aa, synthetic construct
PYQLPQAL

SEQ ID NO: 25450 - protein, 9 aa, synthetic construct
GISFPAPQI

SEQ ID NO: 25451 - protein, 10 aa, synthetic construct
APSFPTGYQY

SEQ ID NO: 25452 - protein, 9 aa, synthetic construct
YIPTNVISI

SEQ ID NO: 25453 - protein, 12 aa, synthetic construct
GSTTVGATLTSV

SEQ ID NO: 25454 - protein, 10 aa, synthetic construct
VQSTSATLTW

SEQ ID NO: 25455 - protein, 8 aa, synthetic construct
LQMFMPFG

SEQ ID NO: 25456 - protein, 9 aa, synthetic construct
PGFAYMMGL

SEQ ID NO: 25457 - protein, 9 aa, synthetic construct
YPGLPFPSI

SEQ ID NO: 25458 - protein, 9 aa, synthetic construct
YPIADLVKM

SEQ ID NO: 25459 - protein, 12 aa, synthetic construct
YPAYGQQPVATA

SEQ ID NO: 25460 - protein, 9 aa, synthetic construct
FQQVSLCVG

SEQ ID NO: 25461 - protein, 8 aa, synthetic construct
YQTPTGLS

SEQ ID NO: 25462 - protein, 9 aa, synthetic construct
GYADIVQLL

SEQ ID NO: 25463 - protein, 8 aa, synthetic construct
VLENYQLL

SEQ ID NO: 25464 - protein, 9 aa, synthetic construct
ESQIMSVAF

SEQ ID NO: 25465 - protein, 10 aa, synthetic construct
VTFADVAIDF

SEQ ID NO: 25466 - protein, 10 aa, synthetic construct
YGLFQASDEI

SEQ ID NO: 25467 - protein, 9 aa, synthetic construct
EASMLEPEL

SEQ ID NO: 25468 - protein, 10 aa, synthetic construct
GSSHTSLYIY

SEQ ID NO: 25469 - protein, 9 aa, synthetic construct
YPNENIGKF

SEQ ID NO: 25470 - protein, 10 aa, synthetic construct
EFSNSSGLNM

SEQ ID NO: 25471 - protein, 9 aa, synthetic construct
GNLDPNKIY

SEQ ID NO: 25472 - protein, 9 aa, synthetic construct
LPDLYSPEY

SEQ ID NO: 25473 - protein, 8 aa, synthetic construct
YLHEDVPW

SEQ ID NO: 25474 - protein, 11 aa, synthetic construct
INSSRVDQLKY

SEQ ID NO: 25475 - protein, 9 aa, synthetic construct
YPWSEVQTF

SEQ ID NO: 25476 - protein, 9 aa, synthetic construct
YYSNLHQTF

SEQ ID NO: 25477 - protein, 9 aa, synthetic construct
YPDHDLGII

SEQ ID NO: 25478 - protein, 9 aa, synthetic construct
QNINPYPTL

SEQ ID NO: 25479 - protein, 10 aa, synthetic construct
SSNSSPASCL

SEQ ID NO: 25480 - protein, 9 aa, synthetic construct
EMSVEVLML

SEQ ID NO: 25481 - protein, 9 aa, synthetic construct
YVVPIYEGY

SEQ ID NO: 25482 - protein, 10 aa, synthetic construct
EKGDSSAEEL

SEQ ID NO: 25483 - protein, 9 aa, synthetic construct
LEMVDLPLT

SEQ ID NO: 25484 - protein, 9 aa, synthetic construct
VDYPESEEI

SEQ ID NO: 25485 - protein, 9 aa, synthetic construct
YCVVCDEPH

SEQ ID NO: 25486 - protein, 10 aa, synthetic construct
QLPFLNEHAY

SEQ ID NO: 25487 - protein, 10 aa, synthetic construct
YPEAIATLPL

SEQ ID NO: 25488 - protein, 10 aa, synthetic construct
SYPEEVSMIV

SEQ ID NO: 25489 - protein, 11 aa, synthetic construct
SNSTGAEVVLY

SEQ ID NO: 25490 - protein, 9 aa, synthetic construct
SLMPTDVVY

SEQ ID NO: 25491 - protein, 10 aa, synthetic construct
LGPEYGVPSF

SEQ ID NO: 25492 - protein, 11 aa, synthetic construct
LSAVPAGGGEA

SEQ ID NO: 25493 - protein, 10 aa, synthetic construct
EMIEAAKAVY

SEQ ID NO: 25494 - protein, 11 aa, synthetic construct
LCPFSAAALKY

SEQ ID NO: 25495 - protein, 11 aa, synthetic construct
YLVHGRGFLLL

SEQ ID NO: 25496 - protein, 11 aa, synthetic construct
EPIKYGELIVL

SEQ ID NO: 25497 - protein, 7 aa, synthetic construct
DTERYLY

SEQ ID NO: 25498 - protein, 10 aa, synthetic construct
ILQNGLYLIY

SEQ ID NO: 25499 - protein, 10 aa, synthetic construct
TVMDWSVVMF

SEQ ID NO: 25500 - protein, 10 aa, synthetic construct
IHQEVNTEPY

SEQ ID NO: 25501 - protein, 10 aa, synthetic construct
YPHAVGKNTL

SEQ ID NO: 25502 - protein, 8 aa, synthetic construct
GFLPYVGM

SEQ ID NO: 25503 - protein, 13 aa, synthetic construct
EVSSDGGTEPSAL

SEQ ID NO: 25504 - protein, 11 aa, synthetic construct
TPTGNSRERPY

SEQ ID NO: 25505 - protein, 10 aa, synthetic construct
IPLFYDSYTS

SEQ ID NO: 25506 - protein, 10 aa, synthetic construct
YPDIMRSVGE

SEQ ID NO: 25507 - protein, 10 aa, synthetic construct
YPFKKRASLQ

SEQ ID NO: 25508 - protein, 10 aa, synthetic construct
YPPVVFKSRT

SEQ ID NO: 25509 - protein, 10 aa, synthetic construct
YRRGIIPTAF

SEQ ID NO: 25510 - protein, 9 aa, synthetic construct
MIRWILKTF

SEQ ID NO: 25511 - protein, 10 aa, synthetic construct
YLMKILTERG

SEQ ID NO: 25512 - protein, 9 aa, synthetic construct
YRQMRKGGF

SEQ ID NO: 25513 - protein, 12 aa, synthetic construct
YPFVKTVASPGV

SEQ ID NO: 25514 - protein, 11 aa, synthetic construct
EALRGSSPILY

SEQ ID NO: 25515 - protein, 8 aa, synthetic construct
YFPILPSY

SEQ ID NO: 25516 - protein, 11 aa, synthetic construct
SSHRINPGLEY

SEQ ID NO: 25517 - protein, 7 aa, synthetic construct
TIPNYVA

SEQ ID NO: 25518 - protein, 8 aa, synthetic construct
YNPLTGIW

SEQ ID NO: 25519 - protein, 8 aa, synthetic construct
IMGITLEE

SEQ ID NO: 25520 - protein, 9 aa, synthetic construct
YPILGLLYD

SEQ ID NO: 25521 - protein, 10 aa, synthetic construct
VDETQVRSLY

SEQ ID NO: 25522 - protein, 8 aa, synthetic construct
YPKQMAEL

SEQ ID NO: 25523 - protein, 9 aa, synthetic construct
YGPQEGDKK

SEQ ID NO: 25524 - protein, 8 aa, synthetic construct
YEMKSQVL

SEQ ID NO: 25525 - protein, 11 aa, synthetic construct
MLLAANLQHGP

SEQ ID NO: 25526 - protein, 11 aa, synthetic construct
PAGLAIDWVTN

SEQ ID NO: 25527 - protein, 10 aa, synthetic construct
QTNRVLEVTN

SEQ ID NO: 25528 - protein, 11 aa, synthetic construct
YPDGRIIMVLP

SEQ ID NO: 25529 - protein, 8 aa, synthetic construct
YLPENFTY

SEQ ID NO: 25530 - protein, 9 aa, synthetic construct
YPIEKFISL

SEQ ID NO: 25531 - protein, 10 aa, synthetic construct
YPLSTVSILF

SEQ ID NO: 25532 - protein, 9 aa, synthetic construct
YLKMYKAII

SEQ ID NO: 25533 - protein, 10 aa, synthetic construct
YPVGPWLLAL

SEQ ID NO: 25534 - protein, 8 aa, synthetic construct
YPKADMQI

SEQ ID NO: 25535 - protein, 9 aa, synthetic construct
YVKHVKILG

SEQ ID NO: 25536 - protein, 9 aa, synthetic construct
YPPRAKLVI

SEQ ID NO: 25537 - protein, 8 aa, synthetic construct
YVRVVGRN

SEQ ID NO: 25538 - protein, 10 aa, synthetic construct
IQNNYGAGVY

SEQ ID NO: 25539 - protein, 11 aa, synthetic construct
ESNEKGESSIY

SEQ ID NO: 25540 - protein, 9 aa, synthetic construct
YPLLLKELV

SEQ ID NO: 25541 - protein, 13 aa, synthetic construct
AATSSAHLEDLAY

SEQ ID NO: 25542 - protein, 10 aa, synthetic construct
YPAVINDISF

SEQ ID NO: 25543 - protein, 9 aa, synthetic construct
VVYLPDVWT

SEQ ID NO: 25544 - protein, 10 aa, synthetic construct
DPSNQVYLSY

SEQ ID NO: 25545 - protein, 11 aa, synthetic construct
LMELGGLFYAI

SEQ ID NO: 25546 - protein, 10 aa, synthetic construct
YMSGTKSTEF

SEQ ID NO: 25547 - protein, 10 aa, synthetic construct
STSNVELSPI

SEQ ID NO: 25548 - protein, 11 aa, synthetic construct
YLMTQIPGTQT

SEQ ID NO: 25549 - protein, 9 aa, synthetic construct
YPEIAEALR

SEQ ID NO: 25550 - protein, 10 aa, synthetic construct
MLRQKALSLY

SEQ ID NO: 25551 - protein, 11 aa, synthetic construct
YPIADLVKMLT

SEQ ID NO: 25552 - protein, 9 aa, synthetic construct
PLYLQPDAY

SEQ ID NO: 25553 - protein, 8 aa, synthetic construct
YPQYVSEI

SEQ ID NO: 25554 - protein, 9 aa, synthetic construct
TIPYLTALL

SEQ ID NO: 25555 - protein, 10 aa, synthetic construct
YADTLISQQS

SEQ ID NO: 25556 - protein, 11 aa, synthetic construct
YPMAPPNGHVS

SEQ ID NO: 25557 - protein, 13 aa, synthetic construct
YPSQSGAGGRPMF

SEQ ID NO: 25558 - protein, 9 aa, synthetic construct
YWNSQEKIL

SEQ ID NO: 25559 - protein, 9 aa, synthetic construct
EARSTQVNF

SEQ ID NO: 25560 - protein, 9 aa, synthetic construct
NLMASSAAI

SEQ ID NO: 25561 - protein, 9 aa, synthetic construct
KGDVMVTCY

SEQ ID NO: 25562 - protein, 9 aa, synthetic construct
TLDGSRVHY

SEQ ID NO: 25563 - protein, 9 aa, synthetic construct
LTCLLRNLY

SEQ ID NO: 25564 - protein, 8 aa, synthetic construct
YPEAITRL

SEQ ID NO: 25565 - protein, 9 aa, synthetic construct
FYNEAFSAL

SEQ ID NO: 25566 - protein, 8 aa, synthetic construct
DFVNLMAY

SEQ ID NO: 25567 - protein, 9 aa, synthetic construct
RTVNETHNF

SEQ ID NO: 25568 - protein, 9 aa, synthetic construct
ASKMEPVVY

SEQ ID NO: 25569 - protein, 9 aa, synthetic construct
YPASPLLGR

SEQ ID NO: 25570 - protein, 9 aa, synthetic construct
FSEYMEKED

SEQ ID NO: 25571 - protein, 9 aa, synthetic construct
LEEKMVTLM

SEQ ID NO: 25572 - protein, 9 aa, synthetic construct
PPQAEFQSY

SEQ ID NO: 25573 - protein, 10 aa, synthetic construct
SLSRDAESPF

SEQ ID NO: 25574 - protein, 9 aa, synthetic construct
YPQVPGSYS

SEQ ID NO: 25575 - protein, 9 aa, synthetic construct
VYMAAVIEY

SEQ ID NO: 25576 - protein, 12 aa, synthetic construct
AVEAVAMVGGQL

SEQ ID NO: 25577 - protein, 11 aa, synthetic construct
MSNETIGTLAF

SEQ ID NO: 25578 - protein, 9 aa, synthetic construct
LKKHVKVSY

SEQ ID NO: 25579 - protein, 9 aa, synthetic construct
RAVFMAVVM

SEQ ID NO: 25580 - protein, 10 aa, synthetic construct
IFLGVNLLAF

SEQ ID NO: 25581 - protein, 10 aa, synthetic construct
LCLSSANSLY

SEQ ID NO: 25582 - protein, 10 aa, synthetic construct
HATPLPLTSL

SEQ ID NO: 25583 - protein, 10 aa, synthetic construct
SRSTKGFPSI

SEQ ID NO: 25584 - protein, 9 aa, synthetic construct
DFGVLSPMH

SEQ ID NO: 25585 - protein, 8 aa, synthetic construct
YSMLSPTY

SEQ ID NO: 25586 - protein, 9 aa, synthetic construct
MTLSYAEYL

SEQ ID NO: 25587 - protein, 8 aa, synthetic construct
TFSYPESY

SEQ ID NO: 25588 - protein, 9 aa, synthetic construct
EAFETAYYL

SEQ ID NO: 25589 - protein, 9 aa, synthetic construct
VDLTGEYKY

SEQ ID NO: 25590 - protein, 10 aa, synthetic construct
YPSCKQLKYF

SEQ ID NO: 25591 - protein, 9 aa, synthetic construct
YTPKVGEYA

SEQ ID NO: 25592 - protein, 10 aa, synthetic construct
TKSGSTPLPL

SEQ ID NO: 25593 - protein, 9 aa, synthetic construct
PYSLSPTML

SEQ ID NO: 25594 - protein, 8 aa, synthetic construct
YPLSLQWL

SEQ ID NO: 25595 - protein, 11 aa, synthetic construct
YGPHASFPLPF

SEQ ID NO: 25596 - protein, 11 aa, synthetic construct
FLGTGTPLTTM

SEQ ID NO: 25597 - protein, 11 aa, synthetic construct
VVRSMSTLLNY

SEQ ID NO: 25598 - protein, 8 aa, synthetic construct
YDGAVSIL

SEQ ID NO: 25599 - protein, 9 aa, synthetic construct
YPLLCDPHY

SEQ ID NO: 25600 - protein, 10 aa, synthetic construct
LETEGATRSM

SEQ ID NO: 25601 - protein, 12 aa, synthetic construct
DGPPGPAGNTGA

SEQ ID NO: 25602 - protein, 10 aa, synthetic construct
VGLESFSLAF

SEQ ID NO: 25603 - protein, 9 aa, synthetic construct
IYNGSSTSF

SEQ ID NO: 25604 - protein, 8 aa, synthetic construct
LTEAVYSY

SEQ ID NO: 25605 - protein, 9 aa, synthetic construct
PVTPSYPDI

SEQ ID NO: 25606 - protein, 9 aa, synthetic construct
YPVDSVKVM

SEQ ID NO: 25607 - protein, 10 aa, synthetic construct
FSMIWSVCAS

SEQ ID NO: 25608 - protein, 9 aa, synthetic construct
YPVPFHDKE

SEQ ID NO: 25609 - protein, 9 aa, synthetic construct
YNKAIDYYL

SEQ ID NO: 25610 - protein, 10 aa, synthetic construct
YTRKLLGSAL

SEQ ID NO: 25611 - protein, 7 aa, synthetic construct
CNLPVYY

SEQ ID NO: 25612 - protein, 9 aa, synthetic construct
NVSAKSCYY

SEQ ID NO: 25613 - protein, 10 aa, synthetic construct
YAREMLAISF

SEQ ID NO: 25614 - protein, 10 aa, synthetic construct
MHQAVPYPSL

SEQ ID NO: 25615 - protein, 9 aa, synthetic construct
EVNISQSTY

SEQ ID NO: 25616 - protein, 9 aa, synthetic construct
LISCKLLTY

SEQ ID NO: 25617 - protein, 10 aa, synthetic construct
YPMVLGAQHF

SEQ ID NO: 25618 - protein, 13 aa, synthetic construct
YPSLKPLGGYVAD

SEQ ID NO: 25619 - protein, 8 aa, synthetic construct
LTPFSIED

SEQ ID NO: 25620 - protein, 8 aa, synthetic construct
ISAWHFPY

SEQ ID NO: 25621 - protein, 10 aa, synthetic construct
YPKSGTTWMI

SEQ ID NO: 25622 - protein, 11 aa, synthetic construct
FQDAPYNEVTG

SEQ ID NO: 25623 - protein, 8 aa, synthetic construct
FSAPYLSY

SEQ ID NO: 25624 - protein, 9 aa, synthetic construct
LEMYAEMLA

SEQ ID NO: 25625 - protein, 10 aa, synthetic construct
YIYPGCDAGI

SEQ ID NO: 25626 - protein, 10 aa, synthetic construct
FFSEVNQEEF

SEQ ID NO: 25627 - protein, 10 aa, synthetic construct
YIAENMKAQN

SEQ ID NO: 25628 - protein, 9 aa, synthetic construct
SDWSTYPEL

SEQ ID NO: 25629 - protein, 9 aa, synthetic construct
YLMGEVTNQ

SEQ ID NO: 25630 - protein, 11 aa, synthetic construct
QPAAPSNGITM

SEQ ID NO: 25631 - protein, 11 aa, synthetic construct
QTASGKTYTMM

SEQ ID NO: 25632 - protein, 10 aa, synthetic construct
PSRTWSPPFE

SEQ ID NO: 25633 - protein, 8 aa, synthetic construct
YYPYTITE

SEQ ID NO: 25634 - protein, 10 aa, synthetic construct
YPIDCVKTRM

SEQ ID NO: 25635 - protein, 11 aa, synthetic construct
YPSIYMPAVLE

SEQ ID NO: 25636 - protein, 11 aa, synthetic construct
VMEIFPLTFGE

SEQ ID NO: 25637 - protein, 11 aa, synthetic construct
QRRMDGSVDFY

SEQ ID NO: 25638 - protein, 8 aa, synthetic construct
SEMKISMQ

SEQ ID NO: 25639 - protein, 10 aa, synthetic construct
LKGSSSNEYL

SEQ ID NO: 25640 - protein, 9 aa, synthetic construct
YQFVIGWTL

SEQ ID NO: 25641 - protein, 8 aa, synthetic construct
YQPSKHWL

SEQ ID NO: 25642 - protein, 9 aa, synthetic construct
YQSIALYFE

SEQ ID NO: 25643 - protein, 10 aa, synthetic construct
YQSWVVVAVP

SEQ ID NO: 25644 - protein, 10 aa, synthetic construct
YPSLKPLGSW

SEQ ID NO: 25645 - protein, 11 aa, synthetic construct
LTQKGSGNAVV

SEQ ID NO: 25646 - protein, 8 aa, synthetic construct
YQHILQMV

SEQ ID NO: 25647 - protein, 10 aa, synthetic construct
QMAVLLVSNI

SEQ ID NO: 25648 - protein, 9 aa, synthetic construct
RSECRANSI

SEQ ID NO: 25649 - protein, 9 aa, synthetic construct
YIQDRREVY

SEQ ID NO: 25650 - protein, 8 aa, synthetic construct
YQLLGIKS

SEQ ID NO: 25651 - protein, 10 aa, synthetic construct
YGAILSQKAH

SEQ ID NO: 25652 - protein, 9 aa, synthetic construct
YQDSSFSLI

SEQ ID NO: 25653 - protein, 8 aa, synthetic construct
LEESKYQY

SEQ ID NO: 25654 - protein, 8 aa, synthetic construct
YQTEKYDL

SEQ ID NO: 25655 - protein, 14 aa, synthetic construct
GGISGTIYEYGALT

SEQ ID NO: 25656 - protein, 12 aa, synthetic construct
LCTTPIPEEQLT

SEQ ID NO: 25657 - protein, 12 aa, synthetic construct
TFESDKGLYQLT

SEQ ID NO: 25658 - protein, 9 aa, synthetic construct
QSTFISENY

SEQ ID NO: 25659 - protein, 9 aa, synthetic construct
GLGYASMVI

SEQ ID NO: 25660 - protein, 9 aa, synthetic construct
YAGGFDKIW

SEQ ID NO: 25661 - protein, 9 aa, synthetic construct
GFSVLGLDV

SEQ ID NO: 25662 - protein, 10 aa, synthetic construct
YQGPMILVLL

SEQ ID NO: 25663 - protein, 8 aa, synthetic construct
CYLKRHRL

SEQ ID NO: 25664 - protein, 10 aa, synthetic construct
EILPNGHVKV

SEQ ID NO: 25665 - protein, 10 aa, synthetic construct
VFEQDEFDVF

SEQ ID NO: 25666 - protein, 9 aa, synthetic construct
STVMDLKKL

SEQ ID NO: 25667 - protein, 10 aa, synthetic construct
VTQNPQQQKL

SEQ ID NO: 25668 - protein, 10 aa, synthetic construct
LEEEILGNMK

SEQ ID NO: 25669 - protein, 9 aa, synthetic construct
IYQMSSQQL

SEQ ID NO: 25670 - protein, 12 aa, synthetic construct
MGGPFDLGHLDF

SEQ ID NO: 25671 - protein, 13 aa, synthetic construct
SRGFGFVTYATVG

SEQ ID NO: 25672 - protein, 9 aa, synthetic construct
MYTRRYSSI

SEQ ID NO: 25673 - protein, 10 aa, synthetic construct
ICGTRPIVQQ

SEQ ID NO: 25674 - protein, 12 aa, synthetic construct
GGLGNGVSRNQL

SEQ ID NO: 25675 - protein, 10 aa, synthetic construct
KDSKEYGHTF

SEQ ID NO: 25676 - protein, 10 aa, synthetic construct
DDIIKNMSFE

SEQ ID NO: 25677 - protein, 10 aa, synthetic construct
QELESLKAVL

SEQ ID NO: 25678 - protein, 9 aa, synthetic construct
KIEFDDLEV

SEQ ID NO: 25679 - protein, 11 aa, synthetic construct
KTAQPNGDWTY

SEQ ID NO: 25680 - protein, 9 aa, synthetic construct
AFETQLRAF

SEQ ID NO: 25681 - protein, 11 aa, synthetic construct
GGPRRALKSEF

SEQ ID NO: 25682 - protein, 12 aa, synthetic construct
LDAPPLPGPIKF

SEQ ID NO: 25683 - protein, 11 aa, synthetic construct
AHAVVASVPVF

SEQ ID NO: 25684 - protein, 10 aa, synthetic construct
AARPFTIPYL

SEQ ID NO: 25685 - protein, 9 aa, synthetic construct
RRYLGLSIL

SEQ ID NO: 25686 - protein, 11 aa, synthetic construct
ANDGLKFSQEY

SEQ ID NO: 25687 - protein, 8 aa, synthetic construct
YRPLQFTV

SEQ ID NO: 25688 - protein, 9 aa, synthetic construct
MVELVKIGK

SEQ ID NO: 25689 - protein, 9 aa, synthetic construct
KRSQSLLGK

SEQ ID NO: 25690 - protein, 9 aa, synthetic construct
TRSYFNMVL

SEQ ID NO: 25691 - protein, 9 aa, synthetic construct
MTKTAWYWY

SEQ ID NO: 25692 - protein, 10 aa, synthetic construct
ANPQWAVDWY

SEQ ID NO: 25693 - protein, 10 aa, synthetic construct
EFLESMTVSY

SEQ ID NO: 25694 - protein, 10 aa, synthetic construct
LPVHMGLVIT

SEQ ID NO: 25695 - protein, 10 aa, synthetic construct
TNAIHNITVL

SEQ ID NO: 25696 - protein, 9 aa, synthetic construct
MEKEEKWVF

SEQ ID NO: 25697 - protein, 10 aa, synthetic construct
WSLSKCTNVF

SEQ ID NO: 25698 - protein, 8 aa, synthetic construct
GLSPYRAL

SEQ ID NO: 25699 - protein, 7 aa, synthetic construct
YRAKEPI

SEQ ID NO: 25700 - protein, 10 aa, synthetic construct
LPSVEELTII

SEQ ID NO: 25701 - protein, 10 aa, synthetic construct
RADSGVGLIL

SEQ ID NO: 25702 - protein, 9 aa, synthetic construct
IPGKSCLLL

SEQ ID NO: 25703 - protein, 8 aa, synthetic construct
YRPPDILL

SEQ ID NO: 25704 - protein, 8 aa, synthetic construct
DRNKEVLL

SEQ ID NO: 25705 - protein, 10 aa, synthetic construct
FSGLIWVVLI

SEQ ID NO: 25706 - protein, 10 aa, synthetic construct
RYKGKKPATL

SEQ ID NO: 25707 - protein, 10 aa, synthetic construct
HPNTRIGVFL

SEQ ID NO: 25708 - protein, 9 aa, synthetic construct
LRHEDEQAL

SEQ ID NO: 25709 - protein, 12 aa, synthetic construct
IAECPGAPAGLA

SEQ ID NO: 25710 - protein, 9 aa, synthetic construct
WWAKALFVI

SEQ ID NO: 25711 - protein, 9 aa, synthetic construct
HLRTTFFVL

SEQ ID NO: 25712 - protein, 10 aa, synthetic construct
GTGKTLCYLM

SEQ ID NO: 25713 - protein, 10 aa, synthetic construct
LAIERMIVEG

SEQ ID NO: 25714 - protein, 11 aa, synthetic construct
QLFNPTLLPHF

SEQ ID NO: 25715 - protein, 10 aa, synthetic construct
FTVAITPRML

SEQ ID NO: 25716 - protein, 10 aa, synthetic construct
FLAPPMLKFT

SEQ ID NO: 25717 - protein, 9 aa, synthetic construct
FREVLEKML

SEQ ID NO: 25718 - protein, 11 aa, synthetic construct
FVSERKPALSM

SEQ ID NO: 25719 - protein, 10 aa, synthetic construct
PLMLPPPLEL

SEQ ID NO: 25720 - protein, 9 aa, synthetic construct
SWNLARFVF

SEQ ID NO: 25721 - protein, 9 aa, synthetic construct
LNKIYRYVF

SEQ ID NO: 25722 - protein, 13 aa, synthetic construct
PGGGSEANGLALV

SEQ ID NO: 25723 - protein, 9 aa, synthetic construct
NPEEHATYY

SEQ ID NO: 25724 - protein, 12 aa, synthetic construct
DGGINDGEPAYS

SEQ ID NO: 25725 - protein, 9 aa, synthetic construct
YCDSYFTFD

SEQ ID NO: 25726 - protein, 10 aa, synthetic construct
YSPSQQEVAG

SEQ ID NO: 25727 - protein, 8 aa, synthetic construct
SYRCFLGY

SEQ ID NO: 25728 - protein, 9 aa, synthetic construct
ECLKSSEYY

SEQ ID NO: 25729 - protein, 10 aa, synthetic construct
VTSYDPLVIY

SEQ ID NO: 25730 - protein, 9 aa, synthetic construct
ELYDSLEMY

SEQ ID NO: 25731 - protein, 9 aa, synthetic construct
YSFWSYLTA

SEQ ID NO: 25732 - protein, 9 aa, synthetic construct
YSEDEQRNL

SEQ ID NO: 25733 - protein, 8 aa, synthetic construct
YSAFRTKL

SEQ ID NO: 25734 - protein, 9 aa, synthetic construct
FVSTRLKTM

SEQ ID NO: 25735 - protein, 10 aa, synthetic construct
YITQNGRLTD

SEQ ID NO: 25736 - protein, 9 aa, synthetic construct
YRRAQMQID

SEQ ID NO: 25737 - protein, 10 aa, synthetic construct
YVKKEDGIND

SEQ ID NO: 25738 - protein, 10 aa, synthetic construct
YSAKRQPMPS

SEQ ID NO: 25739 - protein, 11 aa, synthetic construct
YSALPRGLGCS

SEQ ID NO: 25740 - protein, 11 aa, synthetic construct
YQSQVAKLEDD

SEQ ID NO: 25741 - protein, 12 aa, synthetic construct
YEIKNSVGVNGD

SEQ ID NO: 25742 - protein, 9 aa, synthetic construct
LSHTDVLSY

SEQ ID NO: 25743 - protein, 9 aa, synthetic construct
GFVDKNHSV

SEQ ID NO: 25744 - protein, 9 aa, synthetic construct
DDIIQKNSY

SEQ ID NO: 25745 - protein, 8 aa, synthetic construct
MTVHLLAN

SEQ ID NO: 25746 - protein, 8 aa, synthetic construct
YSPIIAHN

SEQ ID NO: 25747 - protein, 8 aa, synthetic construct
LSPLSYTS

SEQ ID NO: 25748 - protein, 9 aa, synthetic construct
TTITGIEFG

SEQ ID NO: 25749 - protein, 9 aa, synthetic construct
LSPLSYTSA

SEQ ID NO: 25750 - protein, 10 aa, synthetic construct
VYPTTMRALG

SEQ ID NO: 25751 - protein, 10 aa, synthetic construct
FPVHRAGNYS

SEQ ID NO: 25752 - protein, 10 aa, synthetic construct
YPLRYTSMMT

SEQ ID NO: 25753 - protein, 10 aa, synthetic construct
YSPKFEIYSE

SEQ ID NO: 25754 - protein, 10 aa, synthetic construct
YSEYKLIMSE

SEQ ID NO: 25755 - protein, 10 aa, synthetic construct
RVYHVHSDSY

SEQ ID NO: 25756 - protein, 11 aa, synthetic construct
YSPWHGGFLAQ

SEQ ID NO: 25757 - protein, 10 aa, synthetic construct
YSGDIYTMPS

SEQ ID NO: 25758 - protein, 10 aa, synthetic construct
QASSGTIILS

SEQ ID NO: 25759 - protein, 11 aa, synthetic construct
TSFANLEELTY

SEQ ID NO: 25760 - protein, 12 aa, synthetic construct
LDSSGLGFSLEY

SEQ ID NO: 25761 - protein, 11 aa, synthetic construct
AAGGYSSLGMV

SEQ ID NO: 25762 - protein, 11 aa, synthetic construct
LGHAAEKAGMV

SEQ ID NO: 25763 - protein, 9 aa, synthetic construct
YFEFFAADL

SEQ ID NO: 25764 - protein, 9 aa, synthetic construct
SLFSVPVIY

SEQ ID NO: 25765 - protein, 9 aa, synthetic construct
SIFSVLPYR

SEQ ID NO: 25766 - protein, 8 aa, synthetic construct
YTAGEINY

SEQ ID NO: 25767 - protein, 8 aa, synthetic construct
EEYSLDLI

SEQ ID NO: 25768 - protein, 10 aa, synthetic construct
YTDFMGQVIF

SEQ ID NO: 25769 - protein, 9 aa, synthetic construct
SVSLAYMTY

SEQ ID NO: 25770 - protein, 9 aa, synthetic construct
TYDKKVTIY

SEQ ID NO: 25771 - protein, 8 aa, synthetic construct
YTEVIRDV

SEQ ID NO: 25772 - protein, 11 aa, synthetic construct
ESGSEASSPDY

SEQ ID NO: 25773 - protein, 10 aa, synthetic construct
TDADDDVNTY

SEQ ID NO: 25774 - protein, 8 aa, synthetic construct
NWDWESEY

SEQ ID NO: 25775 - protein, 8 aa, synthetic construct
YTDYVSTR

SEQ ID NO: 25776 - protein, 12 aa, synthetic construct
PSGWLTTNSDSF

SEQ ID NO: 25777 - protein, 12 aa, synthetic construct
QYAPEVSVTGYD

SEQ ID NO: 25778 - protein, 10 aa, synthetic construct
LGFCTAVAMY

SEQ ID NO: 25779 - protein, 9 aa, synthetic construct
CHHARRMLY

SEQ ID NO: 25780 - protein, 10 aa, synthetic construct
EEMMELREAF

SEQ ID NO: 25781 - protein, 11 aa, synthetic construct
EKMGGSSGALY

SEQ ID NO: 25782 - protein, 10 aa, synthetic construct
LALFNSAIVM

SEQ ID NO: 25783 - protein, 10 aa, synthetic construct
KIKEFGELDL

SEQ ID NO: 25784 - protein, 8 aa, synthetic construct
KKTCILFL

SEQ ID NO: 25785 - protein, 8 aa, synthetic construct
IVWSWTYL

SEQ ID NO: 25786 - protein, 9 aa, synthetic construct
MVTYAWQLL

SEQ ID NO: 25787 - protein, 9 aa, synthetic construct
FYDTYSLSY

SEQ ID NO: 25788 - protein, 9 aa, synthetic construct
LSSYPNPVA

SEQ ID NO: 25789 - protein, 8 aa, synthetic construct
FRPCTPAV

SEQ ID NO: 25790 - protein, 12 aa, synthetic construct
APSMQNMETSPM

SEQ ID NO: 25791 - protein, 9 aa, synthetic construct
ELVDTYTVY

SEQ ID NO: 25792 - protein, 8 aa, synthetic construct
YTNRTVQI

SEQ ID NO: 25793 - protein, 9 aa, synthetic construct
FYKDDVLFY

SEQ ID NO: 25794 - protein, 9 aa, synthetic construct
ETLAHFEDY

SEQ ID NO: 25795 - protein, 11 aa, synthetic construct
YQTPMEVAVYQ

SEQ ID NO: 25796 - protein, 11 aa, synthetic construct
DVVTMQDYVQY

SEQ ID NO: 25797 - protein, 8 aa, synthetic construct
DVSFPNSI

SEQ ID NO: 25798 - protein, 9 aa, synthetic construct
YVATMKLRN

SEQ ID NO: 25799 - protein, 11 aa, synthetic construct
VSFPGSPPTGG

SEQ ID NO: 25800 - protein, 9 aa, synthetic construct
YSLEPIYGL

SEQ ID NO: 25801 - protein, 11 aa, synthetic construct
QGYNQGYCSYI

SEQ ID NO: 25802 - protein, 9 aa, synthetic construct
VGEEAYFSV

SEQ ID NO: 25803 - protein, 9 aa, synthetic construct
SERDVYLTY

SEQ ID NO: 25804 - protein, 10 aa, synthetic construct
YVKAAEGPVL

SEQ ID NO: 25805 - protein, 8 aa, synthetic construct
QVVYDGLF

SEQ ID NO: 25806 - protein, 9 aa, synthetic construct
FEVFQQDYP

SEQ ID NO: 25807 - protein, 9 aa, synthetic construct
YYVFEISET

SEQ ID NO: 25808 - protein, 11 aa, synthetic construct
YVFFERSYGDM

SEQ ID NO: 25809 - protein, 9 aa, synthetic construct
FQYKEDHPF

SEQ ID NO: 25810 - protein, 10 aa, synthetic construct
QTQANSLTVY

SEQ ID NO: 25811 - protein, 8 aa, synthetic construct
RDQHFSPF

SEQ ID NO: 25812 - protein, 8 aa, synthetic construct
QDRLKCPF

SEQ ID NO: 25813 - protein, 11 aa, synthetic construct
SNNNQALSKNH

SEQ ID NO: 25814 - protein, 10 aa, synthetic construct
SPLFQNFSGY

SEQ ID NO: 25815 - protein, 8 aa, synthetic construct
MFQLNHPF

SEQ ID NO: 25816 - protein, 11 aa, synthetic construct
HASSHVWTDVY

SEQ ID NO: 25817 - protein, 9 aa, synthetic construct
YVLLIRNIF

SEQ ID NO: 25818 - protein, 10 aa, synthetic construct
HDIIMPPLPF

SEQ ID NO: 25819 - protein, 9 aa, synthetic construct
YVPVTTFKD

SEQ ID NO: 25820 - protein, 9 aa, synthetic construct
VYQIATVHY

SEQ ID NO: 25821 - protein, 9 aa, synthetic construct
VYNIKAIKL

SEQ ID NO: 25822 - protein, 12 aa, synthetic construct
ESSPMKGPGGPF

SEQ ID NO: 25823 - protein, 11 aa, synthetic construct
YVTSFGPVSDV

SEQ ID NO: 25824 - protein, 11 aa, synthetic construct
VYVVDMATSVA

SEQ ID NO: 25825 - protein, 9 aa, synthetic construct
VYSTEPLIS

SEQ ID NO: 25826 - protein, 8 aa, synthetic construct
YVYFHIDL

SEQ ID NO: 25827 - protein, 8 aa, synthetic construct
YVQHNRFY

SEQ ID NO: 25828 - protein, 10 aa, synthetic construct
YSQVMPGAPF

SEQ ID NO: 25829 - protein, 11 aa, synthetic construct
GSEPAGHLGVL

SEQ ID NO: 25830 - protein, 9 aa, synthetic construct
VYDVTKMTS

SEQ ID NO: 25831 - protein, 9 aa, synthetic construct
YVSSEHKGR

SEQ ID NO: 25832 - protein, 8 aa, synthetic construct
YVSVRFYE

SEQ ID NO: 25833 - protein, 9 aa, synthetic construct
YVSLFKHQM

SEQ ID NO: 25834 - protein, 9 aa, synthetic construct
TSVCNFFTY

SEQ ID NO: 25835 - protein, 10 aa, synthetic construct
VYTLKKFDPM

SEQ ID NO: 25836 - protein, 8 aa, synthetic construct
SQFCNYIY

SEQ ID NO: 25837 - protein, 10 aa, synthetic construct
FFASMLTYPF

SEQ ID NO: 25838 - protein, 11 aa, synthetic construct
VGSIMAELYML

SEQ ID NO: 25839 - protein, 11 aa, synthetic construct
GGMRDGHYTTF

SEQ ID NO: 25840 - protein, 8 aa, synthetic construct
AGYEYLCI

SEQ ID NO: 25841 - protein, 9 aa, synthetic construct
PNDDDVHFR

SEQ ID NO: 25842 - protein, 9 aa, synthetic construct
YYDLINFTW

SEQ ID NO: 25843 - protein, 8 aa, synthetic construct
IDYYFEVV

SEQ ID NO: 25844 - protein, 9 aa, synthetic construct
YYFGQNLVI

SEQ ID NO: 25845 - protein, 8 aa, synthetic construct
YYMGRWKL

SEQ ID NO: 25846 - protein, 10 aa, synthetic construct
QDLISHNEMF

SEQ ID NO: 25847 - protein, 10 aa, synthetic construct
YYDKNAIAIT

SEQ ID NO: 25848 - protein, 9 aa, synthetic construct
YGYYRTVIF

SEQ ID NO: 25849 - protein, 10 aa, synthetic construct
YYSVLLGLGL

SEQ ID NO: 25850 - protein, 10 aa, synthetic construct
YYNGAVLISI

SEQ ID NO: 25851 - protein, 11 aa, synthetic construct
SASTGHATPLL

SEQ ID NO: 25852 - protein, 10 aa, synthetic construct
DNPDEQAAQI

SEQ ID NO: 25853 - protein, 10 aa, synthetic construct
YYFTFQVLSQ

SEQ ID NO: 25854 - protein, 9 aa, synthetic construct
QTNFILMEH

SEQ ID NO: 25855 - protein, 9 aa, synthetic construct
YYFSKFIEL

SEQ ID NO: 25856 - protein, 11 aa, synthetic construct
QGASIMKPREN

SEQ ID NO: 25857 - protein, 9 aa, synthetic construct
YYRAYVSKK

SEQ ID NO: 25858 - protein, 8 aa, synthetic construct
YYLLVQMV

SEQ ID NO: 25859 - protein, 8 aa, synthetic construct
KDYFSPEL

SEQ ID NO: 25860 - protein, 10 aa, synthetic construct
YYIATMALIT

SEQ ID NO: 25861 - protein, 8 aa, synthetic construct
YYLETSAK

SEQ ID NO: 25862 - protein, 9 aa, synthetic construct
QSQITSQVT

SEQ ID NO: 25863 - protein, 10 aa, synthetic construct
TEIKFSDSFF

SEQ ID NO: 25864 - protein, 9 aa, synthetic construct
YYTAAKKLL

SEQ ID NO: 25865 - protein, 11 aa, synthetic construct
YYLGIGNGTQI

SEQ ID NO: 25866 - protein, 9 aa, synthetic construct
YYNSWALIL

SEQ ID NO: 25867 - protein, 8 aa, synthetic construct
LTNYYQSF

SEQ ID NO: 25868 - protein, 10 aa, synthetic construct
YYLPIVSSFF

SEQ ID NO: 25869 - protein, 9 aa, synthetic construct
YYTCVEVIF

SEQ ID NO: 25870 - protein, 10 aa, synthetic construct
TSRISCSLTL

SEQ ID NO: 25871 - protein, 11 aa, synthetic construct
IHEDAKTCLVL

SEQ ID NO: 25872 - protein, 10 aa, synthetic construct
QDSEPFSPLL

SEQ ID NO: 25873 - protein, 11 aa, synthetic construct
PGGDVSGWGVL

SEQ ID NO: 25874 - protein, 10 aa, synthetic construct
YALPHAVLHL

SEQ ID NO: 25875 - protein, 10 aa, synthetic construct
SVAKMFRAVE

SEQ ID NO: 25876 - protein, 9 aa, synthetic construct
YDSMPLRYS

SEQ ID NO: 25877 - protein, 11 aa, synthetic construct
RFGTMSSMSGA

SEQ ID NO: 25878 - protein, 12 aa, synthetic construct
YGSGSSGFALDS

SEQ ID NO: 25879 - protein, 8 aa, synthetic construct
LYMGLILL

SEQ ID NO: 25880 - protein, 9 aa, synthetic construct
MYPEGQVKS

SEQ ID NO: 25881 - protein, 10 aa, synthetic construct
VDSGEMAESF

SEQ ID NO: 25882 - protein, 9 aa, synthetic construct
WMSAAMISV

SEQ ID NO: 25883 - protein, 9 aa, synthetic construct
TMGMVDIFN

SEQ ID NO: 25884 - protein, 9 aa, synthetic construct
SMSCALAMV

SEQ ID NO: 25885 - protein, 9 aa, synthetic construct
MADRRLSLD

SEQ ID NO: 25886 - protein, 8 aa, synthetic construct
MMRELLLL

SEQ ID NO: 25887 - protein, 8 aa, synthetic construct
NEMIVYSF

SEQ ID NO: 25888 - protein, 9 aa, synthetic construct
LLSMVPVIY

SEQ ID NO: 25889 - protein, 9 aa, synthetic construct
AMLLHGQDV

SEQ ID NO: 25890 - protein, 9 aa, synthetic construct
QGMIPYLPE

SEQ ID NO: 25891 - protein, 9 aa, synthetic construct
AMPLQSNTF

SEQ ID NO: 25892 - protein, 10 aa, synthetic construct
CVSLLRIMAS

SEQ ID NO: 25893 - protein, 9 aa, synthetic construct
MAGTGLLAL

SEQ ID NO: 25894 - protein, 9 aa, synthetic construct
LAAGISMAL

SEQ ID NO: 25895 - protein, 9 aa, synthetic construct
EAMVLESVM

SEQ ID NO: 25896 - protein, 9 aa, synthetic construct
MSWLVDHVY

SEQ ID NO: 25897 - protein, 10 aa, synthetic construct
SMNEELIDTL

SEQ ID NO: 25898 - protein, 9 aa, synthetic construct
DTMLPLALA

SEQ ID NO: 25899 - protein, 9 aa, synthetic construct
LDVMQSMEA

SEQ ID NO: 25900 - protein, 9 aa, synthetic construct
EMEKVMQEL

SEQ ID NO: 25901 - protein, 8 aa, synthetic construct
FQMEVLVP

SEQ ID NO: 25902 - protein, 11 aa, synthetic construct
AQAGLSLMLGV

SEQ ID NO: 25903 - protein, 10 aa, synthetic construct
GLMGMPTGLP

SEQ ID NO: 25904 - protein, 9 aa, synthetic construct
MESIEISLR

SEQ ID NO: 25905 - protein, 10 aa, synthetic construct
PTYDLGVMLP

SEQ ID NO: 25906 - protein, 9 aa, synthetic construct
EMYSVPESI

SEQ ID NO: 25907 - protein, 8 aa, synthetic construct
QDWMPRLI

SEQ ID NO: 25908 - protein, 10 aa, synthetic construct
ISGMYLGEIV

SEQ ID NO: 25909 - protein, 9 aa, synthetic construct
VVQMFETML

SEQ ID NO: 25910 - protein, 9 aa, synthetic construct
FMSKLVPAI

SEQ ID NO: 25911 - protein, 9 aa, synthetic construct
MWNSGFESY

SEQ ID NO: 25912 - protein, 9 aa, synthetic construct
MGFSNIQKL

SEQ ID NO: 25913 - protein, 9 aa, synthetic construct
VPLAEIMGY

SEQ ID NO: 25914 - protein, 9 aa, synthetic construct
ELWSGGWGS

SEQ ID NO: 25915 - protein, 8 aa, synthetic construct
ECLIYGHS

SEQ ID NO: 25916 - protein, 9 aa, synthetic construct
AVMEAAFVY

SEQ ID NO: 25917 - protein, 10 aa, synthetic construct
MLEPPEVKHA

SEQ ID NO: 25918 - protein, 11 aa, synthetic construct
MLLLGGSSPAR

SEQ ID NO: 25919 - protein, 10 aa, synthetic construct
LMLERETLLA

SEQ ID NO: 25920 - protein, 10 aa, synthetic construct
IMLLELQESI

SEQ ID NO: 25921 - protein, 11 aa, synthetic construct
YPLLGATLNGW

SEQ ID NO: 25922 - protein, 10 aa, synthetic construct
LMLGLLEPRM

SEQ ID NO: 25923 - protein, 9 aa, synthetic construct
MKLADSVMA

SEQ ID NO: 25924 - protein, 7 aa, synthetic construct
MLPNSEL

SEQ ID NO: 25925 - protein, 9 aa, synthetic construct
MLPLLAALL

SEQ ID NO: 25926 - protein, 10 aa, synthetic construct
MIAGKSSSLL

SEQ ID NO: 25927 - protein, 8 aa, synthetic construct
PNLSMLPA

SEQ ID NO: 25928 - protein, 10 aa, synthetic construct
PPSSHDAANF

SEQ ID NO: 25929 - protein, 8 aa, synthetic construct
MLDIYWLL

SEQ ID NO: 25930 - protein, 9 aa, synthetic construct
MLRIVESYI

SEQ ID NO: 25931 - protein, 9 aa, synthetic construct
LMPGFIHLV

SEQ ID NO: 25932 - protein, 9 aa, synthetic construct
LMFLSAGPI

SEQ ID NO: 25933 - protein, 9 aa, synthetic construct
YEVQFEILK

SEQ ID NO: 25934 - protein, 9 aa, synthetic construct
LMKHPAVVE

SEQ ID NO: 25935 - protein, 9 aa, synthetic construct
LMLDPNKWL

SEQ ID NO: 25936 - protein, 8 aa, synthetic construct
VVDIMTAE

SEQ ID NO: 25937 - protein, 8 aa, synthetic construct
LMSLLDAD

SEQ ID NO: 25938 - protein, 7 aa, synthetic construct
AFEIERE

SEQ ID NO: 25939 - protein, 8 aa, synthetic construct
AMVTDVLE

SEQ ID NO: 25940 - protein, 8 aa, synthetic construct
LNNFSVAE

SEQ ID NO: 25941 - protein, 8 aa, synthetic construct
ATIEMAIE

SEQ ID NO: 25942 - protein, 9 aa, synthetic construct
IMTEKELLA

SEQ ID NO: 25943 - protein, 10 aa, synthetic construct
NTRLPGIMML

SEQ ID NO: 25944 - protein, 10 aa, synthetic construct
TMLELEKQGL

SEQ ID NO: 25945 - protein, 10 aa, synthetic construct
YPTEQVTIQV

SEQ ID NO: 25946 - protein, 10 aa, synthetic construct
IMETLQEKVA

SEQ ID NO: 25947 - protein, 8 aa, synthetic construct
VYELMKVL

SEQ ID NO: 25948 - protein, 9 aa, synthetic construct
TVLPALMNE

SEQ ID NO: 25949 - protein, 9 aa, synthetic construct
ILMPLASDQ

SEQ ID NO: 25950 - protein, 11 aa, synthetic construct
MGDSLVRETYE

SEQ ID NO: 25951 - protein, 7 aa, synthetic construct
MTTHLIY

SEQ ID NO: 25952 - protein, 9 aa, synthetic construct
RQLKPGLLM

SEQ ID NO: 25953 - protein, 9 aa, synthetic construct
MLKGQPIRI

SEQ ID NO: 25954 - protein, 11 aa, synthetic construct
AGSEPLGCVAF

SEQ ID NO: 25955 - protein, 9 aa, synthetic construct
QTAMITAIL

SEQ ID NO: 25956 - protein, 9 aa, synthetic construct
MTIPRGLNL

SEQ ID NO: 25957 - protein, 10 aa, synthetic construct
ILSDMAPNAT

SEQ ID NO: 25958 - protein, 11 aa, synthetic construct
QLSDGPSIMLF

SEQ ID NO: 25959 - protein, 10 aa, synthetic construct
NQKTLADTHL

SEQ ID NO: 25960 - protein, 9 aa, synthetic construct
MVKVPVGLY

SEQ ID NO: 25961 - protein, 10 aa, synthetic construct
VDLDKRLQYY

SEQ ID NO: 25962 - protein, 8 aa, synthetic construct
MYHPRTTL

SEQ ID NO: 25963 - protein, 9 aa, synthetic construct
TPLYMSPEL

SEQ ID NO: 25964 - protein, 8 aa, synthetic construct
MPESPRFL

SEQ ID NO: 25965 - protein, 9 aa, synthetic construct
STLMGHMLY

SEQ ID NO: 25966 - protein, 9 aa, synthetic construct
CCALPVEAL

SEQ ID NO: 25967 - protein, 11 aa, synthetic construct
DLGPLMVTEAL

SEQ ID NO: 25968 - protein, 9 aa, synthetic construct
PMEVIDNVI

SEQ ID NO: 25969 - protein, 10 aa, synthetic construct
ADLMHDLVAI

SEQ ID NO: 25970 - protein, 9 aa, synthetic construct
QNLQMLQTF

SEQ ID NO: 25971 - protein, 11 aa, synthetic construct
PATMTMALPSL

SEQ ID NO: 25972 - protein, 9 aa, synthetic construct
DMRSGVLGT

SEQ ID NO: 25973 - protein, 10 aa, synthetic construct
MPLQSQQREL

SEQ ID NO: 25974 - protein, 10 aa, synthetic construct
LSSQAMSAAV

SEQ ID NO: 25975 - protein, 12 aa, synthetic construct
LSNFSGAINVTY

SEQ ID NO: 25976 - protein, 8 aa, synthetic construct
FLSVLWEM

SEQ ID NO: 25977 - protein, 9 aa, synthetic construct
NKEMASNIY

SEQ ID NO: 25978 - protein, 9 aa, synthetic construct
EDEVSRVVF

SEQ ID NO: 25979 - protein, 8 aa, synthetic construct
MKWQTKAF

SEQ ID NO: 25980 - protein, 8 aa, synthetic construct
LCLFWLYF

SEQ ID NO: 25981 - protein, 10 aa, synthetic construct
QDMNGILLGY

SEQ ID NO: 25982 - protein, 9 aa, synthetic construct
LPMSPSPLS

SEQ ID NO: 25983 - protein, 11 aa, synthetic construct
VMIVTPNNIMF

SEQ ID NO: 25984 - protein, 10 aa, synthetic construct
PMLPRGPPDH

SEQ ID NO: 25985 - protein, 13 aa, synthetic construct
SIGRMTQDLAGTY

SEQ ID NO: 25986 - protein, 9 aa, synthetic construct
PPYILDILP

SEQ ID NO: 25987 - protein, 9 aa, synthetic construct
DHSQNRPGF

SEQ ID NO: 25988 - protein, 9 aa, synthetic construct
MASLMWTAF

SEQ ID NO: 25989 - protein, 9 aa, synthetic construct
SMFLPQGPF

SEQ ID NO: 25990 - protein, 10 aa, synthetic construct
PPPPPKVPEI

SEQ ID NO: 25991 - protein, 9 aa, synthetic construct
GSKRDHLLM

SEQ ID NO: 25992 - protein, 8 aa, synthetic construct
EVSRHLEF

SEQ ID NO: 25993 - protein, 10 aa, synthetic construct
LGLAAKLMEL

SEQ ID NO: 25994 - protein, 9 aa, synthetic construct
MPLAFCVHP

SEQ ID NO: 25995 - protein, 9 aa, synthetic construct
MLPESEGEF

SEQ ID NO: 25996 - protein, 8 aa, synthetic construct
MPLRKLPY

SEQ ID NO: 25997 - protein, 9 aa, synthetic construct
MPLAGVLVQ

SEQ ID NO: 25998 - protein, 8 aa, synthetic construct
MPLPRQFQ

SEQ ID NO: 25999 - protein, 10 aa, synthetic construct
MLPGLALLLL

SEQ ID NO: 26000 - protein, 13 aa, synthetic construct
DGGCPITSFTLEY

SEQ ID NO: 26001 - protein, 8 aa, synthetic construct
LPMSLDEY

SEQ ID NO: 26002 - protein, 11 aa, synthetic construct
DCPPPSSIGAL

SEQ ID NO: 26003 - protein, 9 aa, synthetic construct
TDHVWTEVY

SEQ ID NO: 26004 - protein, 9 aa, synthetic construct
EWFGSTLYE

SEQ ID NO: 26005 - protein, 9 aa, synthetic construct
REHAMEALL

SEQ ID NO: 26006 - protein, 11 aa, synthetic construct
LCDSRKFGWEY

SEQ ID NO: 26007 - protein, 10 aa, synthetic construct
YYGMKAVLIL

SEQ ID NO: 26008 - protein, 10 aa, synthetic construct
QVGRQSAFQY

SEQ ID NO: 26009 - protein, 9 aa, synthetic construct
EMLPATEVT

SEQ ID NO: 26010 - protein, 9 aa, synthetic construct
VSSYSSYSL

SEQ ID NO: 26011 - protein, 10 aa, synthetic construct
QQKDRALVEL

SEQ ID NO: 26012 - protein, 8 aa, synthetic construct
ATMPEPVY

SEQ ID NO: 26013 - protein, 9 aa, synthetic construct
MPSPARRRE

SEQ ID NO: 26014 - protein, 10 aa, synthetic construct
TTEQVTAMLL

SEQ ID NO: 26015 - protein, 11 aa, synthetic construct
IMPGLETAVVF

SEQ ID NO: 26016 - protein, 10 aa, synthetic construct
VMDIDTSGTF

SEQ ID NO: 26017 - protein, 11 aa, synthetic construct
FMEVVGGEDGF

SEQ ID NO: 26018 - protein, 12 aa, synthetic construct
SPMTPGAPSPGG

SEQ ID NO: 26019 - protein, 11 aa, synthetic construct
MKSLGSHTAIY

SEQ ID NO: 26020 - protein, 10 aa, synthetic construct
MEDLPALASL

SEQ ID NO: 26021 - protein, 9 aa, synthetic construct
MDPNILKTI

SEQ ID NO: 26022 - protein, 12 aa, synthetic construct
MPVVSASWGAKV

SEQ ID NO: 26023 - protein, 9 aa, synthetic construct
IPDMLQSLV

SEQ ID NO: 26024 - protein, 10 aa, synthetic construct
LDVIETCMAY

SEQ ID NO: 26025 - protein, 9 aa, synthetic construct
EYVAVEMPP

SEQ ID NO: 26026 - protein, 9 aa, synthetic construct
IVQAEKPNF

SEQ ID NO: 26027 - protein, 10 aa, synthetic construct
ERTHSEEKAY

SEQ ID NO: 26028 - protein, 11 aa, synthetic construct
LKNGSGDMYPG

SEQ ID NO: 26029 - protein, 11 aa, synthetic construct
MLLAMGLSSAI

SEQ ID NO: 26030 - protein, 12 aa, synthetic construct
MDGASVGANGFV

SEQ ID NO: 26031 - protein, 9 aa, synthetic construct
ARMFGSLLL

SEQ ID NO: 26032 - protein, 10 aa, synthetic construct
TGAWPNGLTV

SEQ ID NO: 26033 - protein, 8 aa, synthetic construct
LMQFKSIL

SEQ ID NO: 26034 - protein, 10 aa, synthetic construct
VSAMFKSLIT

SEQ ID NO: 26035 - protein, 9 aa, synthetic construct
IMQFSLKTL

SEQ ID NO: 26036 - protein, 9 aa, synthetic construct
MLQFLKIST

SEQ ID NO: 26037 - protein, 9 aa, synthetic construct
GMALVMRLL

SEQ ID NO: 26038 - protein, 8 aa, synthetic construct
QLHRIMQL

SEQ ID NO: 26039 - protein, 8 aa, synthetic construct
MQQIRISL

SEQ ID NO: 26040 - protein, 9 aa, synthetic construct
GLGMIVRSI

SEQ ID NO: 26041 - protein, 11 aa, synthetic construct
GAMAKSSSLNV

SEQ ID NO: 26042 - protein, 9 aa, synthetic construct
RWAMGTLAS

SEQ ID NO: 26043 - protein, 9 aa, synthetic construct
QTLCHILGF

SEQ ID NO: 26044 - protein, 8 aa, synthetic construct
YLRCITFL

SEQ ID NO: 26045 - protein, 10 aa, synthetic construct
MMKTTLALFE

SEQ ID NO: 26046 - protein, 10 aa, synthetic construct
IALHDCVLEF

SEQ ID NO: 26047 - protein, 10 aa, synthetic construct
MERLIKKREE

SEQ ID NO: 26048 - protein, 10 aa, synthetic construct
KALARTQRAR

SEQ ID NO: 26049 - protein, 10 aa, synthetic construct
SGKRTSPLLI

SEQ ID NO: 26050 - protein, 11 aa, synthetic construct
RKTSSGLPLIL

SEQ ID NO: 26051 - protein, 10 aa, synthetic construct
PSPYRLLLLL

SEQ ID NO: 26052 - protein, 11 aa, synthetic construct
MLLENIILLLL

SEQ ID NO: 26053 - protein, 10 aa, synthetic construct
EFVIEAGALM

SEQ ID NO: 26054 - protein, 10 aa, synthetic construct
GLGMNKISIF

SEQ ID NO: 26055 - protein, 11 aa, synthetic construct
TTALLTSSLFI

SEQ ID NO: 26056 - protein, 11 aa, synthetic construct
MSPHPTALLGL

SEQ ID NO: 26057 - protein, 10 aa, synthetic construct
VTCFGNIFVI

SEQ ID NO: 26058 - protein, 10 aa, synthetic construct
FYDADTSMLY

SEQ ID NO: 26059 - protein, 9 aa, synthetic construct
MSLSPMTEE

SEQ ID NO: 26060 - protein, 8 aa, synthetic construct
MSYVHRDL

SEQ ID NO: 26061 - protein, 9 aa, synthetic construct
SSFPGLPCI

SEQ ID NO: 26062 - protein, 8 aa, synthetic construct
LMTDVLVF

SEQ ID NO: 26063 - protein, 10 aa, synthetic construct
QSDAYSEIAY

SEQ ID NO: 26064 - protein, 9 aa, synthetic construct
LSAMSYDLY

SEQ ID NO: 26065 - protein, 9 aa, synthetic construct
LMAEAKYYL

SEQ ID NO: 26066 - protein, 9 aa, synthetic construct
MTLKEENSY

SEQ ID NO: 26067 - protein, 10 aa, synthetic construct
CPRTVSDLAL

SEQ ID NO: 26068 - protein, 9 aa, synthetic construct
VSMAPVAVS

SEQ ID NO: 26069 - protein, 9 aa, synthetic construct
GTMVDLILI

SEQ ID NO: 26070 - protein, 8 aa, synthetic construct
MVFLPPKN

SEQ ID NO: 26071 - protein, 7 aa, synthetic construct
VMYKKDY

SEQ ID NO: 26072 - protein, 8 aa, synthetic construct
MVVGIIYI

SEQ ID NO: 26073 - protein, 9 aa, synthetic construct
AEMSLHVIY

SEQ ID NO: 26074 - protein, 9 aa, synthetic construct
EVNEIMVKM

SEQ ID NO: 26075 - protein, 8 aa, synthetic construct
MVIRQEWM

SEQ ID NO: 26076 - protein, 10 aa, synthetic construct
VMFPGNAPSY

SEQ ID NO: 26077 - protein, 8 aa, synthetic construct
LAICHTVM

SEQ ID NO: 26078 - protein, 10 aa, synthetic construct
ATSASRVQEI

SEQ ID NO: 26079 - protein, 10 aa, synthetic construct
PFTMVPDTNY

SEQ ID NO: 26080 - protein, 10 aa, synthetic construct
LSGMLFLNSL

SEQ ID NO: 26081 - protein, 9 aa, synthetic construct
MMEGLPSVA

SEQ ID NO: 26082 - protein, 8 aa, synthetic construct
DGDTEKGQ

SEQ ID NO: 26083 - protein, 12 aa, synthetic construct
NGDAKTDGAQKA

SEQ ID NO: 26084 - protein, 8 aa, synthetic construct
MPTHRSYL

SEQ ID NO: 26085 - protein, 8 aa, synthetic construct
MVNPIGHL

SEQ ID NO: 26086 - protein, 7 aa, synthetic construct
RHMVLLK

SEQ ID NO: 26087 - protein, 10 aa, synthetic construct
PVTPWNVQEL

SEQ ID NO: 26088 - protein, 11 aa, synthetic construct
PSPALVPEAGG

SEQ ID NO: 26089 - protein, 10 aa, synthetic construct
TEMSPEESWE

SEQ ID NO: 26090 - protein, 9 aa, synthetic construct
VMEMKMQSE

SEQ ID NO: 26091 - protein, 8 aa, synthetic construct
SMELWQEA

SEQ ID NO: 26092 - protein, 8 aa, synthetic construct
MSHRATLA

SEQ ID NO: 26093 - protein, 10 aa, synthetic construct
QPMTFPPEAL

SEQ ID NO: 26094 - protein, 9 aa, synthetic construct
QSLQELLAE

SEQ ID NO: 26095 - protein, 9 aa, synthetic construct
SLYSVVPAS

SEQ ID NO: 26096 - protein, 11 aa, synthetic construct
LSRPSETCNET

SEQ ID NO: 26097 - protein, 9 aa, synthetic construct
TMIMDSIAA

SEQ ID NO: 26098 - protein, 9 aa, synthetic construct
MSPESIKMT

SEQ ID NO: 26099 - protein, 9 aa, synthetic construct
SSNDTVFIQ

SEQ ID NO: 26100 - protein, 9 aa, synthetic construct
RTNGVGSLI

SEQ ID NO: 26101 - protein, 8 aa, synthetic construct
NEKLHKEI

SEQ ID NO: 26102 - protein, 11 aa, synthetic construct
FVPLSEYPEKY

SEQ ID NO: 26103 - protein, 9 aa, synthetic construct
QFVLQWLDE

SEQ ID NO: 26104 - protein, 9 aa, synthetic construct
IVFEETMAG

SEQ ID NO: 26105 - protein, 10 aa, synthetic construct
PLARMAGLDI

SEQ ID NO: 26106 - protein, 12 aa, synthetic construct
QHVTELELGMYA

SEQ ID NO: 26107 - protein, 12 aa, synthetic construct
LMSTEASQNITY

SEQ ID NO: 26108 - protein, 11 aa, synthetic construct
GTGFAGIDSSS

SEQ ID NO: 26109 - protein, 10 aa, synthetic construct
QLFVSIIITT

SEQ ID NO: 26110 - protein, 9 aa, synthetic construct
LRELPVDSL

SEQ ID NO: 26111 - protein, 7 aa, synthetic construct
QILVELR

SEQ ID NO: 26112 - protein, 8 aa, synthetic construct
QKAERDDL

SEQ ID NO: 26113 - protein, 10 aa, synthetic construct
MTCFLSDPGL

SEQ ID NO: 26114 - protein, 9 aa, synthetic construct
QVEDLEVKI

SEQ ID NO: 26115 - protein, 9 aa, synthetic construct
EVAELLVHQ

SEQ ID NO: 26116 - protein, 11 aa, synthetic construct
QALTAIVGAWL

SEQ ID NO: 26117 - protein, 10 aa, synthetic construct
QKIDNIGKAF

SEQ ID NO: 26118 - protein, 9 aa, synthetic construct
QKLSEDKNL

SEQ ID NO: 26119 - protein, 12 aa, synthetic construct
APAISSAIDRGD

SEQ ID NO: 26120 - protein, 10 aa, synthetic construct
QLKMEPVTDL

SEQ ID NO: 26121 - protein, 13 aa, synthetic construct
PALASSPSSAPTS

SEQ ID NO: 26122 - protein, 10 aa, synthetic construct
GVILIVRPPF

SEQ ID NO: 26123 - protein, 9 aa, synthetic construct
VPNAEILTE

SEQ ID NO: 26124 - protein, 8 aa, synthetic construct
QLLRFETL

SEQ ID NO: 26125 - protein, 8 aa, synthetic construct
QLQLPGLL

SEQ ID NO: 26126 - protein, 9 aa, synthetic construct
MNQQLGLFL

SEQ ID NO: 26127 - protein, 9 aa, synthetic construct
ENPKGLDTL

SEQ ID NO: 26128 - protein, 8 aa, synthetic construct
EQAPNLVY

SEQ ID NO: 26129 - protein, 9 aa, synthetic construct
KCFFLSLLV

SEQ ID NO: 26130 - protein, 8 aa, synthetic construct
QLQDLPIE

SEQ ID NO: 26131 - protein, 10 aa, synthetic construct
LPPPTSTPEY

SEQ ID NO: 26132 - protein, 10 aa, synthetic construct
DVQFIDYEYS

SEQ ID NO: 26133 - protein, 9 aa, synthetic construct
QPFHMLLLL

SEQ ID NO: 26134 - protein, 8 aa, synthetic construct
MWHLLSFD

SEQ ID NO: 26135 - protein, 9 aa, synthetic construct
TEDQESQHE

SEQ ID NO: 26136 - protein, 9 aa, synthetic construct
PDSPALLYQ

SEQ ID NO: 26137 - protein, 9 aa, synthetic construct
SRTNCVNIL

SEQ ID NO: 26138 - protein, 10 aa, synthetic construct
EQARLLSRSS

SEQ ID NO: 26139 - protein, 10 aa, synthetic construct
PCPAGPLIYT

SEQ ID NO: 26140 - protein, 9 aa, synthetic construct
RKVVIPPSF

SEQ ID NO: 26141 - protein, 9 aa, synthetic construct
MQRLPHLSY

SEQ ID NO: 26142 - protein, 9 aa, synthetic construct
ELYMIPLVL

SEQ ID NO: 26143 - protein, 10 aa, synthetic construct
PENGHIFNCI

SEQ ID NO: 26144 - protein, 10 aa, synthetic construct
PPITLEPPAP

SEQ ID NO: 26145 - protein, 9 aa, synthetic construct
SSTFWFVYV

SEQ ID NO: 26146 - protein, 9 aa, synthetic construct
ATFSCLPGY

SEQ ID NO: 26147 - protein, 11 aa, synthetic construct
DSEEINRQVTY

SEQ ID NO: 26148 - protein, 9 aa, synthetic construct
VLNPHGIKV

SEQ ID NO: 26149 - protein, 9 aa, synthetic construct
QQHIEKKML

SEQ ID NO: 26150 - protein, 9 aa, synthetic construct
SPPAEILEL

SEQ ID NO: 26151 - protein, 8 aa, synthetic construct
QQILWKKV

SEQ ID NO: 26152 - protein, 9 aa, synthetic construct
VPGNVLATL

SEQ ID NO: 26153 - protein, 9 aa, synthetic construct
VPGKPTVTI

SEQ ID NO: 26154 - protein, 10 aa, synthetic construct
PPQTGAGALV

SEQ ID NO: 26155 - protein, 8 aa, synthetic construct
QLQQLEKA

SEQ ID NO: 26156 - protein, 8 aa, synthetic construct
AFYVVKMV

SEQ ID NO: 26157 - protein, 9 aa, synthetic construct
KISAAHIIM

SEQ ID NO: 26158 - protein, 9 aa, synthetic construct
PGPTSLLIS

SEQ ID NO: 26159 - protein, 9 aa, synthetic construct
LPAGDQTEV

SEQ ID NO: 26160 - protein, 10 aa, synthetic construct
LDPPTACVIL

SEQ ID NO: 26161 - protein, 12 aa, synthetic construct
TLVGGADPEGTF

SEQ ID NO: 26162 - protein, 8 aa, synthetic construct
PLHYTKVL

SEQ ID NO: 26163 - protein, 8 aa, synthetic construct
PLMEIRVL

SEQ ID NO: 26164 - protein, 8 aa, synthetic construct
QQLRKLVL

SEQ ID NO: 26165 - protein, 9 aa, synthetic construct
FFSVLLHRV

SEQ ID NO: 26166 - protein, 8 aa, synthetic construct
QQLQQRLQ

SEQ ID NO: 26167 - protein, 8 aa, synthetic construct
WPPKLVRL

SEQ ID NO: 26168 - protein, 8 aa, synthetic construct
AQPELHEV

SEQ ID NO: 26169 - protein, 10 aa, synthetic construct
PGPEGAVLGG

SEQ ID NO: 26170 - protein, 8 aa, synthetic construct
QQQQLPAL

SEQ ID NO: 26171 - protein, 9 aa, synthetic construct
QQGAKRVII

SEQ ID NO: 26172 - protein, 8 aa, synthetic construct
DNPLKLKV

SEQ ID NO: 26173 - protein, 9 aa, synthetic construct
TPASPIACL

SEQ ID NO: 26174 - protein, 8 aa, synthetic construct
LTPNPKKL

SEQ ID NO: 26175 - protein, 7 aa, synthetic construct
HWRSYKL

SEQ ID NO: 26176 - protein, 10 aa, synthetic construct
GAQSAALQKV

SEQ ID NO: 26177 - protein, 10 aa, synthetic construct
SPPGLLVLGG

SEQ ID NO: 26178 - protein, 8 aa, synthetic construct
QLNLNLGV

SEQ ID NO: 26179 - protein, 9 aa, synthetic construct
PSPGKLYLK

SEQ ID NO: 26180 - protein, 8 aa, synthetic construct
QQVIRKIV

SEQ ID NO: 26181 - protein, 8 aa, synthetic construct
QQVQPKPS

SEQ ID NO: 26182 - protein, 8 aa, synthetic construct
QQYLQINQ

SEQ ID NO: 26183 - protein, 11 aa, synthetic construct
VMLNGFGTVVN

SEQ ID NO: 26184 - protein, 8 aa, synthetic construct
KYEYKFGF

SEQ ID NO: 26185 - protein, 8 aa, synthetic construct
FQEKLWCF

SEQ ID NO: 26186 - protein, 9 aa, synthetic construct
FFHTHLQFL

SEQ ID NO: 26187 - protein, 9 aa, synthetic construct
SYLDRVRSL

SEQ ID NO: 26188 - protein, 9 aa, synthetic construct
LPRVLDHLL

SEQ ID NO: 26189 - protein, 10 aa, synthetic construct
SEAAPLLVHV

SEQ ID NO: 26190 - protein, 10 aa, synthetic construct
WGMPPTIIRE

SEQ ID NO: 26191 - protein, 8 aa, synthetic construct
QLKSLVKI

SEQ ID NO: 26192 - protein, 11 aa, synthetic construct
LSAMELAEQIT

SEQ ID NO: 26193 - protein, 8 aa, synthetic construct
GDPLTVPV

SEQ ID NO: 26194 - protein, 9 aa, synthetic construct
QARDWSHYF

SEQ ID NO: 26195 - protein, 8 aa, synthetic construct
LMESLSKL

SEQ ID NO: 26196 - protein, 9 aa, synthetic construct
DVMIFNGLV

SEQ ID NO: 26197 - protein, 10 aa, synthetic construct
TGNGTEVPLS

SEQ ID NO: 26198 - protein, 11 aa, synthetic construct
SALDNGPQIAY

SEQ ID NO: 26199 - protein, 9 aa, synthetic construct
TPEQIEKIY

SEQ ID NO: 26200 - protein, 9 aa, synthetic construct
TDPPDLLVS

SEQ ID NO: 26201 - protein, 8 aa, synthetic construct
QKPSILVV

SEQ ID NO: 26202 - protein, 8 aa, synthetic construct
LPDPVMPH

SEQ ID NO: 26203 - protein, 12 aa, synthetic construct
DPMGGKTSAYKV

SEQ ID NO: 26204 - protein, 10 aa, synthetic construct
TPASPATPAQ

SEQ ID NO: 26205 - protein, 9 aa, synthetic construct
PATIPENAQ

SEQ ID NO: 26206 - protein, 8 aa, synthetic construct
QVHLSPDA

SEQ ID NO: 26207 - protein, 8 aa, synthetic construct
ISMPSEGL

SEQ ID NO: 26208 - protein, 9 aa, synthetic construct
MTVTDPGLS

SEQ ID NO: 26209 - protein, 10 aa, synthetic construct
MTVTDPGLSS

SEQ ID NO: 26210 - protein, 9 aa, synthetic construct
ILSPDRQYI

SEQ ID NO: 26211 - protein, 8 aa, synthetic construct
QVRATEAW

SEQ ID NO: 26212 - protein, 8 aa, synthetic construct
DLEKFCSE

SEQ ID NO: 26213 - protein, 8 aa, synthetic construct
YPQFEQSE

SEQ ID NO: 26214 - protein, 9 aa, synthetic construct
ESLSMTQSE

SEQ ID NO: 26215 - protein, 9 aa, synthetic construct
EYRSGEASE

SEQ ID NO: 26216 - protein, 9 aa, synthetic construct
HPSDVEESQ

SEQ ID NO: 26217 - protein, 10 aa, synthetic construct
LYSLTLCSFE

SEQ ID NO: 26218 - protein, 8 aa, synthetic construct
MHMEQSLY

SEQ ID NO: 26219 - protein, 9 aa, synthetic construct
CTCPAGFQL

SEQ ID NO: 26220 - protein, 10 aa, synthetic construct
SPADPRPARL

SEQ ID NO: 26221 - protein, 8 aa, synthetic construct
IMWIIRTV

SEQ ID NO: 26222 - protein, 9 aa, synthetic construct
QSSFTTELS

SEQ ID NO: 26223 - protein, 8 aa, synthetic construct
PMDNLISL

SEQ ID NO: 26224 - protein, 10 aa, synthetic construct
LGSTGCQIIF

SEQ ID NO: 26225 - protein, 8 aa, synthetic construct
LPKDMHVI

SEQ ID NO: 26226 - protein, 10 aa, synthetic construct
AAQGDVELLS

SEQ ID NO: 26227 - protein, 10 aa, synthetic construct
QMPSDKTIGG

SEQ ID NO: 26228 - protein, 11 aa, synthetic construct
GYSSYGQSQSG

SEQ ID NO: 26229 - protein, 9 aa, synthetic construct
GEAPSNIYV

SEQ ID NO: 26230 - protein, 10 aa, synthetic construct
DIKGMHTLLV

SEQ ID NO: 26231 - protein, 8 aa, synthetic construct
QWEETVTY

SEQ ID NO: 26232 - protein, 10 aa, synthetic construct
ADPSLNPEQL

SEQ ID NO: 26233 - protein, 11 aa, synthetic construct
ALAAAGYDVEK

SEQ ID NO: 26234 - protein, 11 aa, synthetic construct
ALAAGGYDVEK

SEQ ID NO: 26235 - protein, 11 aa, synthetic construct
DAVEDLESVGK

SEQ ID NO: 26236 - protein, 10 aa, synthetic construct
DKSTTPASNI

SEQ ID NO: 26237 - protein, 8 aa, synthetic construct
EAQAATGF

SEQ ID NO: 26238 - protein, 11 aa, synthetic construct
EGVHGGLINKK

SEQ ID NO: 26239 - protein, 9 aa, synthetic construct
EQGFLSFWR

SEQ ID NO: 26240 - protein, 8 aa, synthetic construct
FARMLAQE

SEQ ID NO: 26241 - protein, 11 aa, synthetic construct
FVSISDLLVPK

SEQ ID NO: 26242 - protein, 10 aa, synthetic construct
FVSTTYSGVT

SEQ ID NO: 26243 - protein, 11 aa, synthetic construct
GDLGIEIPAEK

SEQ ID NO: 26244 - protein, 11 aa, synthetic construct
GFAFVQYVNER

SEQ ID NO: 26245 - protein, 11 aa, synthetic construct
GFINYEVGDSK

SEQ ID NO: 26246 - protein, 11 aa, synthetic construct
GGEDYTGATVI

SEQ ID NO: 26247 - protein, 10 aa, synthetic construct
GGFGGFGSGG

SEQ ID NO: 26248 - protein, 11 aa, synthetic construct
GGGFSSGSAGI

SEQ ID NO: 26249 - protein, 9 aa, synthetic construct
GGPGGFGPG

SEQ ID NO: 26250 - protein, 11 aa, synthetic construct
GIQEEMEALVK

SEQ ID NO: 26251 - protein, 11 aa, synthetic construct
GKYIKLQNVYR

SEQ ID NO: 26252 - protein, 9 aa, synthetic construct
GPSSVEDIK

SEQ ID NO: 26253 - protein, 9 aa, synthetic construct
IAENAVSNL

SEQ ID NO: 26254 - protein, 10 aa, synthetic construct
IEEELGDEAR

SEQ ID NO: 26255 - protein, 11 aa, synthetic construct
INGLRQVLDNL

SEQ ID NO: 26256 - protein, 10 aa, synthetic construct
IQLINNMLDK

SEQ ID NO: 26257 - protein, 10 aa, synthetic construct
ISGLIYEETR

SEQ ID NO: 26258 - protein, 9 aa, synthetic construct
KAEIPILPD

SEQ ID NO: 26259 - protein, 11 aa, synthetic construct
LCFVYPLDFAR

SEQ ID NO: 26260 - protein, 9 aa, synthetic construct
LEKLGINAP

SEQ ID NO: 26261 - protein, 9 aa, synthetic construct
LENLKQIHF

SEQ ID NO: 26262 - protein, 8 aa, synthetic construct
LFGNETEA

SEQ ID NO: 26263 - protein, 10 aa, synthetic construct
LGIHEDSTNR

SEQ ID NO: 26264 - protein, 11 aa, synthetic construct
LKGDDLQAIKK

SEQ ID NO: 26265 - protein, 9 aa, synthetic construct
LQPLNVKVD

SEQ ID NO: 26266 - protein, 9 aa, synthetic construct
LVLTGYQVD

SEQ ID NO: 26267 - protein, 10 aa, synthetic construct
NLLEGHARAE

SEQ ID NO: 26268 - protein, 11 aa, synthetic construct
NQWQLSADDLK

SEQ ID NO: 26269 - protein, 11 aa, synthetic construct
NSLESYAFNMK

SEQ ID NO: 26270 - protein, 11 aa, synthetic construct
NSLISQNIPGP

SEQ ID NO: 26271 - protein, 10 aa, synthetic construct
PSDDTKGFFD

SEQ ID NO: 26272 - protein, 10 aa, synthetic construct
PVGALGLKGN

SEQ ID NO: 26273 - protein, 9 aa, synthetic construct
QLSADDLKK

SEQ ID NO: 26274 - protein, 10 aa, synthetic construct
SAAPTFMISP

SEQ ID NO: 26275 - protein, 8 aa, synthetic construct
SGPPVSEL

SEQ ID NO: 26276 - protein, 10 aa, synthetic construct
SHFDADEIKR

SEQ ID NO: 26277 - protein, 9 aa, synthetic construct
SLVNLGGSK

SEQ ID NO: 26278 - protein, 10 aa, synthetic construct
SYASNYVPKM

SEQ ID NO: 26279 - protein, 11 aa, synthetic construct
TEISFRPNDPK

SEQ ID NO: 26280 - protein, 10 aa, synthetic construct
TLIAVMAFCA

SEQ ID NO: 26281 - protein, 11 aa, synthetic construct
TNAENEFVTIK

SEQ ID NO: 26282 - protein, 8 aa, synthetic construct
TPWLGLIV

SEQ ID NO: 26283 - protein, 11 aa, synthetic construct
VEEHEETFEEK

SEQ ID NO: 26284 - protein, 8 aa, synthetic construct
VFLENVIR

SEQ ID NO: 26285 - protein, 11 aa, synthetic construct
VFSGLVSTGLK

SEQ ID NO: 26286 - protein, 9 aa, synthetic construct
VIIGGQENP

SEQ ID NO: 26287 - protein, 8 aa, synthetic construct
VLLGLSQN

SEQ ID NO: 26288 - protein, 11 aa, synthetic construct
VRFLEQQNQVL

SEQ ID NO: 26289 - protein, 11 aa, synthetic construct
VTTLLNAGGEK

SEQ ID NO: 26290 - protein, 8 aa, synthetic construct
YENEVALR

SEQ ID NO: 26291 - protein, 10 aa, synthetic construct
YGSSSFGGSY

SEQ ID NO: 26292 - protein, 11 aa, synthetic construct
YSLEPVAVELK

SEQ ID NO: 26293 - protein, 8 aa, synthetic construct
AFLEVNEE

SEQ ID NO: 26294 - protein, 11 aa, synthetic construct
AIAFSICDLMK

SEQ ID NO: 26295 - protein, 11 aa, synthetic construct
AKLKELQAIAE

SEQ ID NO: 26296 - protein, 11 aa, synthetic construct
ALFSTLAQAEE

SEQ ID NO: 26297 - protein, 11 aa, synthetic construct
DKVGEARALYN

SEQ ID NO: 26298 - protein, 8 aa, synthetic construct
DNGCTEFK

SEQ ID NO: 26299 - protein, 9 aa, synthetic construct
DPSLNPEQL

SEQ ID NO: 26300 - protein, 9 aa, synthetic construct
GGKYQGTIL

SEQ ID NO: 26301 - protein, 10 aa, synthetic construct
GRILSGVVTK

SEQ ID NO: 26302 - protein, 9 aa, synthetic construct
GVLAYARLS

SEQ ID NO: 26303 - protein, 9 aa, synthetic construct
IFAIAKELL

SEQ ID NO: 26304 - protein, 11 aa, synthetic construct
KMDLESQIESL

SEQ ID NO: 26305 - protein, 10 aa, synthetic construct
LFSSLVTKED

SEQ ID NO: 26306 - protein, 8 aa, synthetic construct
LKKILGEL

SEQ ID NO: 26307 - protein, 9 aa, synthetic construct
NAPWAVTSL

SEQ ID NO: 26308 - protein, 10 aa, synthetic construct
PGQSSSSSQT

SEQ ID NO: 26309 - protein, 9 aa, synthetic construct
SIPILASAL

SEQ ID NO: 26310 - protein, 7 aa, synthetic construct
SVVNQSL

SEQ ID NO: 26311 - protein, 11 aa, synthetic construct
TAAENDFVTLK

SEQ ID NO: 26312 - protein, 11 aa, synthetic construct
TFTGGQNNTLP

SEQ ID NO: 26313 - protein, 9 aa, synthetic construct
TLLDIDNTR

SEQ ID NO: 26314 - protein, 10 aa, synthetic construct
VNVELLNALH

SEQ ID NO: 26315 - protein, 11 aa, synthetic construct
VWIVTSEISDM

SEQ ID NO: 26316 - protein, 9 aa, synthetic construct
YALNSKRMF

SEQ ID NO: 26317 - protein, 9 aa, synthetic construct
YFAERVTSL

SEQ ID NO: 26318 - protein, 9 aa, synthetic construct
AQYEDIAQK

SEQ ID NO: 26319 - protein, 10 aa, synthetic construct
IVFVGTGQTY

SEQ ID NO: 26320 - protein, 7 aa, synthetic construct
PSNVSNI

SEQ ID NO: 26321 - protein, 8 aa, synthetic construct
SLLQPLNV

SEQ ID NO: 26322 - protein, 11 aa, synthetic construct
ESVFNQAIRNT

SEQ ID NO: 26323 - protein, 9 aa, synthetic construct
FGMRNSAAS

SEQ ID NO: 26324 - protein, 11 aa, synthetic construct
LQENYRLKNEL

SEQ ID NO: 26325 - protein, 8 aa, synthetic construct
LTINNSSL

SEQ ID NO: 26326 - protein, 9 aa, synthetic construct
NKTWSLSLK

SEQ ID NO: 26327 - protein, 8 aa, synthetic construct
VEFLLNAH

SEQ ID NO: 26328 - protein, 8 aa, synthetic construct
VKINNVDL

SEQ ID NO: 26329 - protein, 8 aa, synthetic construct
ALVFEAPN

SEQ ID NO: 26330 - protein, 8 aa, synthetic construct
FSLNLTVK

SEQ ID NO: 26331 - protein, 10 aa, synthetic construct
INMALLLAYS

SEQ ID NO: 26332 - protein, 9 aa, synthetic construct
LDNLLTQPA

SEQ ID NO: 26333 - protein, 11 aa, synthetic construct
MNPDKISAPLL

SEQ ID NO: 26334 - protein, 10 aa, synthetic construct
NIVGERGRLD

SEQ ID NO: 26335 - protein, 8 aa, synthetic construct
NYTTNYTK

SEQ ID NO: 26336 - protein, 10 aa, synthetic construct
SFVYNHYLFS

SEQ ID NO: 26337 - protein, 11 aa, synthetic construct
YSASDNSFTNV

SEQ ID NO: 26338 - protein, 8 aa, synthetic construct
KSPGASNF

SEQ ID NO: 26339 - protein, 11 aa, synthetic construct
LKNKYENEKAM

SEQ ID NO: 26340 - protein, 8 aa, synthetic construct
NDLGLREL

SEQ ID NO: 26341 - protein, 9 aa, synthetic construct
SIVNEKWIV

SEQ ID NO: 26342 - protein, 11 aa, synthetic construct
SLYAKNKSTTV

SEQ ID NO: 26343 - protein, 11 aa, synthetic construct
ALVFGVNTFIA

SEQ ID NO: 26344 - protein, 11 aa, synthetic construct
ANISVLFGFIN

SEQ ID NO: 26345 - protein, 9 aa, synthetic construct
APVGGSPGL

SEQ ID NO: 26346 - protein, 10 aa, synthetic construct
AVGNINELPE

SEQ ID NO: 26347 - protein, 10 aa, synthetic construct
ENSTLSASNK

SEQ ID NO: 26348 - protein, 9 aa, synthetic construct
FTNLTTGIY

SEQ ID NO: 26349 - protein, 8 aa, synthetic construct
GEVVTTTI

SEQ ID NO: 26350 - protein, 8 aa, synthetic construct
GLLPVSEN

SEQ ID NO: 26351 - protein, 9 aa, synthetic construct
ILDEVIMGY

SEQ ID NO: 26352 - protein, 11 aa, synthetic construct
INIEMYQKLQG

SEQ ID NO: 26353 - protein, 9 aa, synthetic construct
LLPEGPPAI

SEQ ID NO: 26354 - protein, 9 aa, synthetic construct
NAHLRTAHS

SEQ ID NO: 26355 - protein, 9 aa, synthetic construct
QLFEDLVYL

SEQ ID NO: 26356 - protein, 9 aa, synthetic construct
QLLPNVTTV

SEQ ID NO: 26357 - protein, 8 aa, synthetic construct
SKPPVISL

SEQ ID NO: 26358 - protein, 9 aa, synthetic construct
SPQDFGLVL

SEQ ID NO: 26359 - protein, 10 aa, synthetic construct
SQNSFIKQYL

SEQ ID NO: 26360 - protein, 9 aa, synthetic construct
YANSSLIKY

SEQ ID NO: 26361 - protein, 7 aa, synthetic construct
ANTIGEN

SEQ ID NO: 26362 - protein, 9 aa, synthetic construct
YYDVPIATL

SEQ ID NO: 26363 - protein, 10 aa, synthetic construct
QLPFLNEHAY

SEQ ID NO: 26364 - protein, 10 aa, synthetic construct
AEMSRSVALA

SEQ ID NO: 26365 - protein, 9 aa, synthetic construct
AEVGGLLEA

SEQ ID NO: 26366 - protein, 10 aa, synthetic construct
ALLGVRGVGK

SEQ ID NO: 26367 - protein, 9 aa, synthetic construct
APFPKSRCL

SEQ ID NO: 26368 - protein, 11 aa, synthetic construct
APGAMRLSLPL

SEQ ID NO: 26369 - protein, 9 aa, synthetic construct
ARWEEIPKR

SEQ ID NO: 26370 - protein, 9 aa, synthetic construct
ASQRAEVII

SEQ ID NO: 26371 - protein, 11 aa, synthetic construct
AVLKPGAWSRK

SEQ ID NO: 26372 - protein, 11 aa, synthetic construct
AVMPAELWLTR

SEQ ID NO: 26373 - protein, 10 aa, synthetic construct
EIFSGNGHCY

SEQ ID NO: 26374 - protein, 9 aa, synthetic construct
ETSEFMVFY

SEQ ID NO: 26375 - protein, 11 aa, synthetic construct
EVVDSHQMLQF

SEQ ID NO: 26376 - protein, 10 aa, synthetic construct
FLFTIPVFFT

SEQ ID NO: 26377 - protein, 10 aa, synthetic construct
GESPWLGPQS

SEQ ID NO: 26378 - protein, 10 aa, synthetic construct
GFDTFFKDLT

SEQ ID NO: 26379 - protein, 10 aa, synthetic construct
GFYTYQTSVL

SEQ ID NO: 26380 - protein, 9 aa, synthetic construct
GGMSIFLKK

SEQ ID NO: 26381 - protein, 9 aa, synthetic construct
GILDLGVAA

SEQ ID NO: 26382 - protein, 9 aa, synthetic construct
GLGGSLNDI

SEQ ID NO: 26383 - protein, 9 aa, synthetic construct
GRLQHPLLR

SEQ ID NO: 26384 - protein, 9 aa, synthetic construct
GRVHLSPAL

SEQ ID NO: 26385 - protein, 11 aa, synthetic construct
GSFFSLQHPPK

SEQ ID NO: 26386 - protein, 8 aa, synthetic construct
GTLLSAPE

SEQ ID NO: 26387 - protein, 9 aa, synthetic construct
GVSLMTVPK

SEQ ID NO: 26388 - protein, 9 aa, synthetic construct
HFLFCVPFK

SEQ ID NO: 26389 - protein, 10 aa, synthetic construct
HTADVHGLYY

SEQ ID NO: 26390 - protein, 8 aa, synthetic construct
IISAFIYL

SEQ ID NO: 26391 - protein, 9 aa, synthetic construct
ILLYYIEDH

SEQ ID NO: 26392 - protein, 10 aa, synthetic construct
IYGAGFQKCA

SEQ ID NO: 26393 - protein, 9 aa, synthetic construct
KEAELDLIA

SEQ ID NO: 26394 - protein, 9 aa, synthetic construct
KEEIHSVVL

SEQ ID NO: 26395 - protein, 9 aa, synthetic construct
KPACPLRPL

SEQ ID NO: 26396 - protein, 11 aa, synthetic construct
KPMEVFQSSSL

SEQ ID NO: 26397 - protein, 10 aa, synthetic construct
KRFEPLGMQK

SEQ ID NO: 26398 - protein, 9 aa, synthetic construct
KYMKEKLLF

SEQ ID NO: 26399 - protein, 10 aa, synthetic construct
LEAAAAVVAA

SEQ ID NO: 26400 - protein, 10 aa, synthetic construct
LEAHGREAVA

SEQ ID NO: 26401 - protein, 9 aa, synthetic construct
LEYSGVISA

SEQ ID NO: 26402 - protein, 10 aa, synthetic construct
LPAQLLGLLM

SEQ ID NO: 26403 - protein, 11 aa, synthetic construct
LPLPSQVGSRY

SEQ ID NO: 26404 - protein, 10 aa, synthetic construct
LSFFLLSPVL

SEQ ID NO: 26405 - protein, 8 aa, synthetic construct
LSGEFASI

SEQ ID NO: 26406 - protein, 9 aa, synthetic construct
LSGRHILAR

SEQ ID NO: 26407 - protein, 9 aa, synthetic construct
MAIEAQQKF

SEQ ID NO: 26408 - protein, 9 aa, synthetic construct
MEARPPPPP

SEQ ID NO: 26409 - protein, 8 aa, synthetic construct
MIFKRVVL

SEQ ID NO: 26410 - protein, 9 aa, synthetic construct
MMPWRAASL

SEQ ID NO: 26411 - protein, 11 aa, synthetic construct
MPAVHPHTVAF

SEQ ID NO: 26412 - protein, 9 aa, synthetic construct
MPTMRLLSF

SEQ ID NO: 26413 - protein, 9 aa, synthetic construct
MQLGVHYSK

SEQ ID NO: 26414 - protein, 9 aa, synthetic construct
MTLMVFLFK

SEQ ID NO: 26415 - protein, 9 aa, synthetic construct
MTMSTILSK

SEQ ID NO: 26416 - protein, 11 aa, synthetic construct
PAAPTPATATT

SEQ ID NO: 26417 - protein, 9 aa, synthetic construct
PAGSVSVTL

SEQ ID NO: 26418 - protein, 8 aa, synthetic construct
PWCPAPAK

SEQ ID NO: 26419 - protein, 9 aa, synthetic construct
PYPLVNDTL

SEQ ID NO: 26420 - protein, 8 aa, synthetic construct
QALILHAK

SEQ ID NO: 26421 - protein, 8 aa, synthetic construct
QFLKTSVI

SEQ ID NO: 26422 - protein, 9 aa, synthetic construct
QLDNLKVEL

SEQ ID NO: 26423 - protein, 10 aa, synthetic construct
QPRWYTLKPL

SEQ ID NO: 26424 - protein, 9 aa, synthetic construct
REFATWSHF

SEQ ID NO: 26425 - protein, 9 aa, synthetic construct
REWRPPNPP

SEQ ID NO: 26426 - protein, 9 aa, synthetic construct
RGNLPLPLK

SEQ ID NO: 26427 - protein, 9 aa, synthetic construct
RPWSTTLQY

SEQ ID NO: 26428 - protein, 9 aa, synthetic construct
RRQQLITRF

SEQ ID NO: 26429 - protein, 9 aa, synthetic construct
SCIKFKTFK

SEQ ID NO: 26430 - protein, 9 aa, synthetic construct
SFSLSKVSF

SEQ ID NO: 26431 - protein, 11 aa, synthetic construct
SLLQPETPGLK

SEQ ID NO: 26432 - protein, 9 aa, synthetic construct
SLSSWSLMK

SEQ ID NO: 26433 - protein, 9 aa, synthetic construct
SLYLSYRPK

SEQ ID NO: 26434 - protein, 9 aa, synthetic construct
SPMVAETPL

SEQ ID NO: 26435 - protein, 9 aa, synthetic construct
SPTLNVSAL

SEQ ID NO: 26436 - protein, 11 aa, synthetic construct
SPWVGTEKGTF

SEQ ID NO: 26437 - protein, 9 aa, synthetic construct
SRLTGLLGK

SEQ ID NO: 26438 - protein, 9 aa, synthetic construct
STYIILVLK

SEQ ID NO: 26439 - protein, 9 aa, synthetic construct
TETSATQLW

SEQ ID NO: 26440 - protein, 8 aa, synthetic construct
TFFLFKSE

SEQ ID NO: 26441 - protein, 9 aa, synthetic construct
TVLSDFHAK

SEQ ID NO: 26442 - protein, 8 aa, synthetic construct
VFIEDVSK

SEQ ID NO: 26443 - protein, 9 aa, synthetic construct
VTVSTPLCK

SEQ ID NO: 26444 - protein, 11 aa, synthetic construct
VVHGGMSIFLK

SEQ ID NO: 26445 - protein, 10 aa, synthetic construct
VVISRAISVK

SEQ ID NO: 26446 - protein, 11 aa, synthetic construct
VYAEMEKIRFA

SEQ ID NO: 26447 - protein, 9 aa, synthetic construct
VYLMLKMSL

SEQ ID NO: 26448 - protein, 9 aa, synthetic construct
WRSMCILPR

SEQ ID NO: 26449 - protein, 9 aa, synthetic construct
YEKILMGLE

SEQ ID NO: 26450 - protein, 9 aa, synthetic construct
YLSTPFLSK

SEQ ID NO: 26451 - protein, 8 aa, synthetic construct
YMKEKLLF

SEQ ID NO: 26452 - protein, 8 aa, synthetic construct
AAAAPQLL

SEQ ID NO: 26453 - protein, 10 aa, synthetic construct
AAPAHVSPAL

SEQ ID NO: 26454 - protein, 8 aa, synthetic construct
DGRPQVFP

SEQ ID NO: 26455 - protein, 11 aa, synthetic construct
ITGMAASEALA

SEQ ID NO: 26456 - protein, 8 aa, synthetic construct
VENALLEA

SEQ ID NO: 26457 - protein, 9 aa, synthetic construct
QAQPPGGQK

SEQ ID NO: 26458 - protein, 9 aa, synthetic construct
AVLAAVTEV

SEQ ID NO: 26459 - protein, 8 aa, synthetic construct
ALLRREVL

SEQ ID NO: 26460 - protein, 8 aa, synthetic construct
AIRFKDLK

SEQ ID NO: 26461 - protein, 8 aa, synthetic construct
KEFVKRLA

SEQ ID NO: 26462 - protein, 10 aa, synthetic construct
AISAGFLALK

SEQ ID NO: 26463 - protein, 9 aa, synthetic construct
AIPKSSFLK

SEQ ID NO: 26464 - protein, 9 aa, synthetic construct
AAAPAAGAI

SEQ ID NO: 26465 - protein, 9 aa, synthetic construct
AAPGALPAL

SEQ ID NO: 26466 - protein, 9 aa, synthetic construct
APAGVVPGL

SEQ ID NO: 26467 - protein, 11 aa, synthetic construct
APFVSKSSMAP

SEQ ID NO: 26468 - protein, 9 aa, synthetic construct
APFPCVQYR

SEQ ID NO: 26469 - protein, 10 aa, synthetic construct
ALTKEEQLPI

SEQ ID NO: 26470 - protein, 12 aa, synthetic construct
AVSAIPSSSIPL

SEQ ID NO: 26471 - protein, 12 aa, synthetic construct
AGPLKGSGAAGL

SEQ ID NO: 26472 - protein, 11 aa, synthetic construct
APDAAPAPASI

SEQ ID NO: 26473 - protein, 10 aa, synthetic construct
KPASSSGFTV

SEQ ID NO: 26474 - protein, 9 aa, synthetic construct
FGRTKQAAF

SEQ ID NO: 26475 - protein, 10 aa, synthetic construct
AQPRAPAPAF

SEQ ID NO: 26476 - protein, 10 aa, synthetic construct
LGMIGLFGAF

SEQ ID NO: 26477 - protein, 9 aa, synthetic construct
VPVHSRAAF

SEQ ID NO: 26478 - protein, 10 aa, synthetic construct
PGILQMLLPV

SEQ ID NO: 26479 - protein, 9 aa, synthetic construct
LCRLPLLPV

SEQ ID NO: 26480 - protein, 10 aa, synthetic construct
KDARKGPLVP

SEQ ID NO: 26481 - protein, 9 aa, synthetic construct
WRSLPLLPV

SEQ ID NO: 26482 - protein, 9 aa, synthetic construct
GVSPAGAAL

SEQ ID NO: 26483 - protein, 9 aa, synthetic construct
ARGTYRLVI

SEQ ID NO: 26484 - protein, 10 aa, synthetic construct
VMTSQLTAAS

SEQ ID NO: 26485 - protein, 10 aa, synthetic construct
AYPSAKTPSS

SEQ ID NO: 26486 - protein, 9 aa, synthetic construct
ALPRAHPIP

SEQ ID NO: 26487 - protein, 9 aa, synthetic construct
LHPAARPPI

SEQ ID NO: 26488 - protein, 10 aa, synthetic construct
NMSPKNLPKR

SEQ ID NO: 26489 - protein, 9 aa, synthetic construct
AGTQERVLI

SEQ ID NO: 26490 - protein, 12 aa, synthetic construct
AVLTRPRAASRS

SEQ ID NO: 26491 - protein, 11 aa, synthetic construct
AVIKLLNEKEQ

SEQ ID NO: 26492 - protein, 12 aa, synthetic construct
AKVLEPSETLVV

SEQ ID NO: 26493 - protein, 11 aa, synthetic construct
GLLKAQQEERL

SEQ ID NO: 26494 - protein, 12 aa, synthetic construct
AVLSTAEAKPII

SEQ ID NO: 26495 - protein, 13 aa, synthetic construct
VAMTVALSVPEIG

SEQ ID NO: 26496 - protein, 11 aa, synthetic construct
TATTEPAVHGL

SEQ ID NO: 26497 - protein, 11 aa, synthetic construct
LDLADRLISKA

SEQ ID NO: 26498 - protein, 10 aa, synthetic construct
LDLARMNLLR

SEQ ID NO: 26499 - protein, 8 aa, synthetic construct
EVEKNPKP

SEQ ID NO: 26500 - protein, 9 aa, synthetic construct
TDKIISMFY

SEQ ID NO: 26501 - protein, 8 aa, synthetic construct
SEVMREWY

SEQ ID NO: 26502 - protein, 10 aa, synthetic construct
EGDQRAGGYY

SEQ ID NO: 26503 - protein, 11 aa, synthetic construct
TAMQAASQNGH

SEQ ID NO: 26504 - protein, 9 aa, synthetic construct
APDTIICSF

SEQ ID NO: 26505 - protein, 9 aa, synthetic construct
LEESSWWSC

SEQ ID NO: 26506 - protein, 9 aa, synthetic construct
ELVMVSALM

SEQ ID NO: 26507 - protein, 10 aa, synthetic construct
ITDVSVGAFG

SEQ ID NO: 26508 - protein, 10 aa, synthetic construct
EFQNMYIQLF

SEQ ID NO: 26509 - protein, 11 aa, synthetic construct
LFFTMTVAARQ

SEQ ID NO: 26510 - protein, 12 aa, synthetic construct
LFFGASLCSALV

SEQ ID NO: 26511 - protein, 10 aa, synthetic construct
FFIGIKHELQ

SEQ ID NO: 26512 - protein, 9 aa, synthetic construct
FLGALPVKL

SEQ ID NO: 26513 - protein, 9 aa, synthetic construct
IFHLQLIPV

SEQ ID NO: 26514 - protein, 10 aa, synthetic construct
LFLHAGIVLP

SEQ ID NO: 26515 - protein, 9 aa, synthetic construct
FQDYVARVE

SEQ ID NO: 26516 - protein, 10 aa, synthetic construct
VVAGFSIHVE

SEQ ID NO: 26517 - protein, 9 aa, synthetic construct
FVHSDLALR

SEQ ID NO: 26518 - protein, 10 aa, synthetic construct
GEQERKNPMA

SEQ ID NO: 26519 - protein, 11 aa, synthetic construct
GESGPRGFPGP

SEQ ID NO: 26520 - protein, 8 aa, synthetic construct
GQLSIRCW

SEQ ID NO: 26521 - protein, 12 aa, synthetic construct
TGSTRIPGTENG

SEQ ID NO: 26522 - protein, 9 aa, synthetic construct
FGTYYRMIQ

SEQ ID NO: 26523 - protein, 8 aa, synthetic construct
GLDLIVQA

SEQ ID NO: 26524 - protein, 8 aa, synthetic construct
INSVANDI

SEQ ID NO: 26525 - protein, 10 aa, synthetic construct
LGVGLATRKL

SEQ ID NO: 26526 - protein, 11 aa, synthetic construct
SGLISYSVSLV

SEQ ID NO: 26527 - protein, 11 aa, synthetic construct
VVFSATTTVTV

SEQ ID NO: 26528 - protein, 10 aa, synthetic construct
GPAALTRLLG

SEQ ID NO: 26529 - protein, 11 aa, synthetic construct
GAGLGRAYALA

SEQ ID NO: 26530 - protein, 12 aa, synthetic construct
GAGLGGFAAVSL

SEQ ID NO: 26531 - protein, 9 aa, synthetic construct
KKMGFPLLR

SEQ ID NO: 26532 - protein, 9 aa, synthetic construct
HRAVVSALP

SEQ ID NO: 26533 - protein, 10 aa, synthetic construct
VIADDLPHPF

SEQ ID NO: 26534 - protein, 10 aa, synthetic construct
KPCLQPHMLR

SEQ ID NO: 26535 - protein, 11 aa, synthetic construct
GSEDVRLMKPP

SEQ ID NO: 26536 - protein, 10 aa, synthetic construct
GPVGFPVPSG

SEQ ID NO: 26537 - protein, 8 aa, synthetic construct
GTITLGPE

SEQ ID NO: 26538 - protein, 8 aa, synthetic construct
RSLLKMPS

SEQ ID NO: 26539 - protein, 8 aa, synthetic construct
RSYPSLKP

SEQ ID NO: 26540 - protein, 10 aa, synthetic construct
HFIYDISAKT

SEQ ID NO: 26541 - protein, 9 aa, synthetic construct
LHPSIPVYK

SEQ ID NO: 26542 - protein, 10 aa, synthetic construct
GDRNFAIGYY

SEQ ID NO: 26543 - protein, 9 aa, synthetic construct
VSTHVPSFP

SEQ ID NO: 26544 - protein, 8 aa, synthetic construct
RHNYRTCF

SEQ ID NO: 26545 - protein, 8 aa, synthetic construct
LFLASLYI

SEQ ID NO: 26546 - protein, 11 aa, synthetic construct
LLAPRDPDPQG

SEQ ID NO: 26547 - protein, 9 aa, synthetic construct
YVSALRCFF

SEQ ID NO: 26548 - protein, 10 aa, synthetic construct
PFRAFGSHPF

SEQ ID NO: 26549 - protein, 9 aa, synthetic construct
LPAGETQGY

SEQ ID NO: 26550 - protein, 9 aa, synthetic construct
ISDGPFSVN

SEQ ID NO: 26551 - protein, 10 aa, synthetic construct
EVKERVELLI

SEQ ID NO: 26552 - protein, 10 aa, synthetic construct
IWDKAVVTGK

SEQ ID NO: 26553 - protein, 9 aa, synthetic construct
LEERSLTIR

SEQ ID NO: 26554 - protein, 8 aa, synthetic construct
LYQEYRDK

SEQ ID NO: 26555 - protein, 8 aa, synthetic construct
LYQFQMVW

SEQ ID NO: 26556 - protein, 10 aa, synthetic construct
LYGIPQHAES

SEQ ID NO: 26557 - protein, 9 aa, synthetic construct
IYGKKFDDE

SEQ ID NO: 26558 - protein, 9 aa, synthetic construct
IEKEAVEIA

SEQ ID NO: 26559 - protein, 10 aa, synthetic construct
PKEPGQSVVI

SEQ ID NO: 26560 - protein, 9 aa, synthetic construct
KILERWWGT

SEQ ID NO: 26561 - protein, 9 aa, synthetic construct
QKIYIYTLK

SEQ ID NO: 26562 - protein, 10 aa, synthetic construct
SCGTLPLPLR

SEQ ID NO: 26563 - protein, 12 aa, synthetic construct
DSGRYSPLSSSL

SEQ ID NO: 26564 - protein, 10 aa, synthetic construct
DIHPLPLCRL

SEQ ID NO: 26565 - protein, 12 aa, synthetic construct
LPAAHIPAPPHE

SEQ ID NO: 26566 - protein, 10 aa, synthetic construct
FDKNSTFGSV

SEQ ID NO: 26567 - protein, 10 aa, synthetic construct
LAEAAVAAVA

SEQ ID NO: 26568 - protein, 10 aa, synthetic construct
LEAVHRGDVG

SEQ ID NO: 26569 - protein, 9 aa, synthetic construct
LVSGEIYGT

SEQ ID NO: 26570 - protein, 10 aa, synthetic construct
LLEVLQHKAS

SEQ ID NO: 26571 - protein, 11 aa, synthetic construct
QVEEALHQLHA

SEQ ID NO: 26572 - protein, 10 aa, synthetic construct
PDPNTCLGVF

SEQ ID NO: 26573 - protein, 9 aa, synthetic construct
LAPPPSSPL

SEQ ID NO: 26574 - protein, 10 aa, synthetic construct
IAPLQVALLM

SEQ ID NO: 26575 - protein, 8 aa, synthetic construct
QLPHMDPI

SEQ ID NO: 26576 - protein, 12 aa, synthetic construct
LPLPPRGDAPPS

SEQ ID NO: 26577 - protein, 13 aa, synthetic construct
LPLPPGGTSPSPP

SEQ ID NO: 26578 - protein, 10 aa, synthetic construct
LPSSQSPSLL

SEQ ID NO: 26579 - protein, 9 aa, synthetic construct
PSESRQVLL

SEQ ID NO: 26580 - protein, 10 aa, synthetic construct
LVDSTRAGPL

SEQ ID NO: 26581 - protein, 9 aa, synthetic construct
IQLFSFILL

SEQ ID NO: 26582 - protein, 8 aa, synthetic construct
VTGEFTGI

SEQ ID NO: 26583 - protein, 11 aa, synthetic construct
ILPASKMNLLL

SEQ ID NO: 26584 - protein, 9 aa, synthetic construct
LSRLGHLAR

SEQ ID NO: 26585 - protein, 9 aa, synthetic construct
LSLPSGLLE

SEQ ID NO: 26586 - protein, 9 aa, synthetic construct
QVTKDAGTI

SEQ ID NO: 26587 - protein, 10 aa, synthetic construct
GLVGGPGLVA

SEQ ID NO: 26588 - protein, 9 aa, synthetic construct
LVGAPQALA

SEQ ID NO: 26589 - protein, 8 aa, synthetic construct
IGNPVQVL

SEQ ID NO: 26590 - protein, 8 aa, synthetic construct
GPVNALIR

SEQ ID NO: 26591 - protein, 8 aa, synthetic construct
LVGPNVQI

SEQ ID NO: 26592 - protein, 9 aa, synthetic construct
LGVGLPNGL

SEQ ID NO: 26593 - protein, 9 aa, synthetic construct
VILLGNGTL

SEQ ID NO: 26594 - protein, 9 aa, synthetic construct
SLIIDDTEY

SEQ ID NO: 26595 - protein, 11 aa, synthetic construct
MAAAAAAAAEQ

SEQ ID NO: 26596 - protein, 9 aa, synthetic construct
IMAEKVNNF

SEQ ID NO: 26597 - protein, 10 aa, synthetic construct
MTTGPPPPPP

SEQ ID NO: 26598 - protein, 12 aa, synthetic construct
HPSCPGPRELEA

SEQ ID NO: 26599 - protein, 11 aa, synthetic construct
EMERKEEQAEA

SEQ ID NO: 26600 - protein, 12 aa, synthetic construct
QGVCMELAEIEA

SEQ ID NO: 26601 - protein, 9 aa, synthetic construct
LGLLKREMA

SEQ ID NO: 26602 - protein, 10 aa, synthetic construct
VSELITKAVA

SEQ ID NO: 26603 - protein, 11 aa, synthetic construct
AVVTISASLVA

SEQ ID NO: 26604 - protein, 11 aa, synthetic construct
VLLSLGMGAVA

SEQ ID NO: 26605 - protein, 10 aa, synthetic construct
LMASRVIAVA

SEQ ID NO: 26606 - protein, 8 aa, synthetic construct
YEMQALAS

SEQ ID NO: 26607 - protein, 9 aa, synthetic construct
ASDMYSLGT

SEQ ID NO: 26608 - protein, 8 aa, synthetic construct
MGFLFTLL

SEQ ID NO: 26609 - protein, 9 aa, synthetic construct
RMPGPGLTL

SEQ ID NO: 26610 - protein, 8 aa, synthetic construct
LMMLKKLL

SEQ ID NO: 26611 - protein, 9 aa, synthetic construct
LDPRGSRMM

SEQ ID NO: 26612 - protein, 10 aa, synthetic construct
EQWMAKPVAF

SEQ ID NO: 26613 - protein, 9 aa, synthetic construct
YVTVKGGHM

SEQ ID NO: 26614 - protein, 9 aa, synthetic construct
QARAAVMVY

SEQ ID NO: 26615 - protein, 8 aa, synthetic construct
VHFPMVVY

SEQ ID NO: 26616 - protein, 9 aa, synthetic construct
MIDNLKVDY

SEQ ID NO: 26617 - protein, 9 aa, synthetic construct
HNFSKLFSM

SEQ ID NO: 26618 - protein, 8 aa, synthetic construct
NRREKCTY

SEQ ID NO: 26619 - protein, 8 aa, synthetic construct
LVWVWCTY

SEQ ID NO: 26620 - protein, 10 aa, synthetic construct
MGGEVTKRSF

SEQ ID NO: 26621 - protein, 11 aa, synthetic construct
GMAGIGGLQKM

SEQ ID NO: 26622 - protein, 9 aa, synthetic construct
GMALQLGCL

SEQ ID NO: 26623 - protein, 10 aa, synthetic construct
TLNVKTPIME

SEQ ID NO: 26624 - protein, 8 aa, synthetic construct
MTMRLTKM

SEQ ID NO: 26625 - protein, 10 aa, synthetic construct
MTMLKAMAVK

SEQ ID NO: 26626 - protein, 9 aa, synthetic construct
RHTQIRPTM

SEQ ID NO: 26627 - protein, 10 aa, synthetic construct
GGPPGRGLAL

SEQ ID NO: 26628 - protein, 11 aa, synthetic construct
NPGIIGLGGLV

SEQ ID NO: 26629 - protein, 11 aa, synthetic construct
PTAAPTALGEA

SEQ ID NO: 26630 - protein, 9 aa, synthetic construct
APVSGSVTI

SEQ ID NO: 26631 - protein, 8 aa, synthetic construct
VSNPSLIT

SEQ ID NO: 26632 - protein, 10 aa, synthetic construct
GPPCRLLDLW

SEQ ID NO: 26633 - protein, 10 aa, synthetic construct
LPLFPPLIYL

SEQ ID NO: 26634 - protein, 10 aa, synthetic construct
LLPLFPPLIY

SEQ ID NO: 26635 - protein, 9 aa, synthetic construct
LPLLRVLSI

SEQ ID NO: 26636 - protein, 9 aa, synthetic construct
AYRLEPLIL

SEQ ID NO: 26637 - protein, 7 aa, synthetic construct
PWCLHIT

SEQ ID NO: 26638 - protein, 9 aa, synthetic construct
PYPSPKTIE

SEQ ID NO: 26639 - protein, 8 aa, synthetic construct
QAILVPRP

SEQ ID NO: 26640 - protein, 10 aa, synthetic construct
GGLSGKSTVI

SEQ ID NO: 26641 - protein, 9 aa, synthetic construct
QINDVIKEI

SEQ ID NO: 26642 - protein, 10 aa, synthetic construct
GPPVSRDRVI

SEQ ID NO: 26643 - protein, 10 aa, synthetic construct
VPASPWGLRL

SEQ ID NO: 26644 - protein, 10 aa, synthetic construct
GLASPPWRVL

SEQ ID NO: 26645 - protein, 12 aa, synthetic construct
LLSQETAGQKPL

SEQ ID NO: 26646 - protein, 9 aa, synthetic construct
SQPGIRLPL

SEQ ID NO: 26647 - protein, 8 aa, synthetic construct
TVQTFVIL

SEQ ID NO: 26648 - protein, 8 aa, synthetic construct
LQSLFSLI

SEQ ID NO: 26649 - protein, 8 aa, synthetic construct
AKEFISII

SEQ ID NO: 26650 - protein, 8 aa, synthetic construct
NLTFLSIL

SEQ ID NO: 26651 - protein, 11 aa, synthetic construct
PSGNGYKFLSP

SEQ ID NO: 26652 - protein, 10 aa, synthetic construct
LVSLAMCSHF

SEQ ID NO: 26653 - protein, 13 aa, synthetic construct
VGAWEMAATTNSA

SEQ ID NO: 26654 - protein, 14 aa, synthetic construct
FCGGVGKAGAQDSA

SEQ ID NO: 26655 - protein, 11 aa, synthetic construct
QTPPPRGTTPP

SEQ ID NO: 26656 - protein, 9 aa, synthetic construct
LPVMPIPKI

SEQ ID NO: 26657 - protein, 11 aa, synthetic construct
DKGSAGLPGLR

SEQ ID NO: 26658 - protein, 11 aa, synthetic construct
NIQRASGPTGL

SEQ ID NO: 26659 - protein, 9 aa, synthetic construct
RETRGELQY

SEQ ID NO: 26660 - protein, 10 aa, synthetic construct
RFVRVAELPR

SEQ ID NO: 26661 - protein, 10 aa, synthetic construct
RRVFGLLERP

SEQ ID NO: 26662 - protein, 10 aa, synthetic construct
VILLENLTRF

SEQ ID NO: 26663 - protein, 11 aa, synthetic construct
ERILAAAFPAR

SEQ ID NO: 26664 - protein, 10 aa, synthetic construct
NVLVPRLTCS

SEQ ID NO: 26665 - protein, 8 aa, synthetic construct
SEEHEKST

SEQ ID NO: 26666 - protein, 8 aa, synthetic construct
QEAQNRMS

SEQ ID NO: 26667 - protein, 8 aa, synthetic construct
DTMEASRH

SEQ ID NO: 26668 - protein, 8 aa, synthetic construct
TWNRISLP

SEQ ID NO: 26669 - protein, 9 aa, synthetic construct
EDITVLVTP

SEQ ID NO: 26670 - protein, 9 aa, synthetic construct
FATTSIKSF

SEQ ID NO: 26671 - protein, 10 aa, synthetic construct
SGGGLPTGDY

SEQ ID NO: 26672 - protein, 9 aa, synthetic construct
GTVPSTVAL

SEQ ID NO: 26673 - protein, 10 aa, synthetic construct
ISLQKPNHVF

SEQ ID NO: 26674 - protein, 9 aa, synthetic construct
SSLCLMKTV

SEQ ID NO: 26675 - protein, 9 aa, synthetic construct
LSYLKYRSP

SEQ ID NO: 26676 - protein, 9 aa, synthetic construct
APTMVDTIP

SEQ ID NO: 26677 - protein, 9 aa, synthetic construct
TGMPLESPL

SEQ ID NO: 26678 - protein, 10 aa, synthetic construct
SKRFAQWSHL

SEQ ID NO: 26679 - protein, 9 aa, synthetic construct
SPRSPSPSL

SEQ ID NO: 26680 - protein, 9 aa, synthetic construct
SPKEGLSAL

SEQ ID NO: 26681 - protein, 8 aa, synthetic construct
SPAVLRPI

SEQ ID NO: 26682 - protein, 8 aa, synthetic construct
SVPLARPL

SEQ ID NO: 26683 - protein, 10 aa, synthetic construct
RSGTVQILIL

SEQ ID NO: 26684 - protein, 9 aa, synthetic construct
ALRSSILGK

SEQ ID NO: 26685 - protein, 10 aa, synthetic construct
GEKRGGWFSG

SEQ ID NO: 26686 - protein, 11 aa, synthetic construct
SVGIGVPIMLA

SEQ ID NO: 26687 - protein, 11 aa, synthetic construct
ALFSVAAPALP

SEQ ID NO: 26688 - protein, 9 aa, synthetic construct
VSATLKSTV

SEQ ID NO: 26689 - protein, 9 aa, synthetic construct
SLSLGSLKT

SEQ ID NO: 26690 - protein, 8 aa, synthetic construct
SVATLRMK

SEQ ID NO: 26691 - protein, 10 aa, synthetic construct
LLGISAVDSS

SEQ ID NO: 26692 - protein, 10 aa, synthetic construct
ITVNGAVLSS

SEQ ID NO: 26693 - protein, 9 aa, synthetic construct
ETTSATLQW

SEQ ID NO: 26694 - protein, 9 aa, synthetic construct
DPQPLSFKE

SEQ ID NO: 26695 - protein, 8 aa, synthetic construct
TPVKLIHN

SEQ ID NO: 26696 - protein, 9 aa, synthetic construct
TPAPRIPLG

SEQ ID NO: 26697 - protein, 9 aa, synthetic construct
LVAPTVSME

SEQ ID NO: 26698 - protein, 9 aa, synthetic construct
ATVTCFTGF

SEQ ID NO: 26699 - protein, 9 aa, synthetic construct
SLLGRIQKD

SEQ ID NO: 26700 - protein, 9 aa, synthetic construct
TVLNRTNLV

SEQ ID NO: 26701 - protein, 9 aa, synthetic construct
LSLNRPVVT

SEQ ID NO: 26702 - protein, 9 aa, synthetic construct
TVISQLHGY

SEQ ID NO: 26703 - protein, 10 aa, synthetic construct
TVLSGGGRDR

SEQ ID NO: 26704 - protein, 10 aa, synthetic construct
SLETPGGPAI

SEQ ID NO: 26705 - protein, 8 aa, synthetic construct
ISEKVSTF

SEQ ID NO: 26706 - protein, 9 aa, synthetic construct
VSLVAHTTL

SEQ ID NO: 26707 - protein, 9 aa, synthetic construct
APLLKDLGN

SEQ ID NO: 26708 - protein, 11 aa, synthetic construct
GSVLLAPGAVG

SEQ ID NO: 26709 - protein, 9 aa, synthetic construct
VELQRMKIS

SEQ ID NO: 26710 - protein, 8 aa, synthetic construct
VFLLDDKS

SEQ ID NO: 26711 - protein, 9 aa, synthetic construct
VFIAIATDS

SEQ ID NO: 26712 - protein, 8 aa, synthetic construct
RTDIVMDV

SEQ ID NO: 26713 - protein, 11 aa, synthetic construct
VLGQPKANPTV

SEQ ID NO: 26714 - protein, 9 aa, synthetic construct
LPVSYFKVP

SEQ ID NO: 26715 - protein, 9 aa, synthetic construct
VPGLCLLVL

SEQ ID NO: 26716 - protein, 10 aa, synthetic construct
VQYLLNKAKF

SEQ ID NO: 26717 - protein, 9 aa, synthetic construct
AISMPQKSF

SEQ ID NO: 26718 - protein, 10 aa, synthetic construct
VSISADGRIS

SEQ ID NO: 26719 - protein, 11 aa, synthetic construct
MVAQLRGSQVV

SEQ ID NO: 26720 - protein, 9 aa, synthetic construct
VVLVEKRTK

SEQ ID NO: 26721 - protein, 13 aa, synthetic construct
VYASVHPSIPTSV

SEQ ID NO: 26722 - protein, 9 aa, synthetic construct
VYLLFLAQM

SEQ ID NO: 26723 - protein, 10 aa, synthetic construct
VYNPLPSPSR

SEQ ID NO: 26724 - protein, 9 aa, synthetic construct
VYYPIIFSQ

SEQ ID NO: 26725 - protein, 9 aa, synthetic construct
VIYMLIQAY

SEQ ID NO: 26726 - protein, 8 aa, synthetic construct
TMWRIFTG

SEQ ID NO: 26727 - protein, 10 aa, synthetic construct
GSGNVSYVKT

SEQ ID NO: 26728 - protein, 10 aa, synthetic construct
GGLCRPPPGT

SEQ ID NO: 26729 - protein, 10 aa, synthetic construct
TPLTPTSHTG

SEQ ID NO: 26730 - protein, 9 aa, synthetic construct
TFVSGCRKG

SEQ ID NO: 26731 - protein, 12 aa, synthetic construct
GVALCGFCFHMK

SEQ ID NO: 26732 - protein, 10 aa, synthetic construct
YLGDLIMALA

SEQ ID NO: 26733 - protein, 8 aa, synthetic construct
YEILPQRI

SEQ ID NO: 26734 - protein, 8 aa, synthetic construct
YISTMIRR

SEQ ID NO: 26735 - protein, 9 aa, synthetic construct
YGIILNSIY

SEQ ID NO: 26736 - protein, 9 aa, synthetic construct
YMTAVVKLF

SEQ ID NO: 26737 - protein, 8 aa, synthetic construct
MPTHRSYL

SEQ ID NO: 26738 - DNA, 669 bp, synthetic construct
  source 1..669: mol_type = other DNA
ctgggcctaaggaagcagcactggtggtgcctcagccatggcctggaccgttctcctcctcggcctcctctctcactgcacaggctctgtgacgtcctatgttctgactcagccaccctcagtgtcagcggccccaggacagacggccaggattgtctgtggcggagacaacattggaagtaaaactgtgcactggtaccagcagaagccaggccaggcccctgtcttggtcatctattatgatagcggccggccctcagggatccctgagcgattttctggctccaactctgggaacgcggccaccctcaccatcagcagggtcgaacccggggatgaggccgactattactgtcacgtgtgggatagtagtgctgatcgtcacgtcttcggaactgggaccaaggtcaccgtcctaggtcagcccaaggccaaccccactgtcactctgttcccgccctcctctgaggagctccaagccaacaaggccacactagtgtgtctgatcagtgacttctacccgggagctgtgacagtggcctggaaggcagatggcagccccgtcaaggcgggagtggagaccaccaaaccctccaaacagagcaacaacaaatacgcggccagcagctacctgagcctgacgcccgagcagtggaagtcccacagaag

SEQ ID NO: 26739 - DNA, 58 bp, synthetic construct
  source 1..58: mol_type = other DNA
gctcatttgcatgttcccagagcacaacctcctgccctgaagccttattaataggctg

SEQ ID NO: 26740 - DNA, 624 bp, synthetic construct
  source 1..624: mol_type = other DNA
gacccagtcaggacacagcatggacatgagggtccccgctcagctcctggggctcctgctgctctggctcccaggtgccaaatgtgacatccagatgacccagtctccatccatcctgtctgcatctgtaggagacagagtcactctcacttgccgggccagtctgagtattaatagatgggtggcctggtatcaacaaaaaccagggaaagcccctaaagtcctgatctatcaggcgtctattttagaaagtggggtcccattaaggttcagcggcagtggatctgagacagaattcactctcaccatcagcagcctgcagcctgatgattttgcaacctattactgccaacaatataatatgtacccgtacacttttggccaggggaccgagctggagatcaaacgaactgtggctgcaccatctgtcttcatcttcccgccatctgatgagcagttgaaatctggaactgcctctgttgtgtgcctgctgaataacttctatcccagagaggccaaagtacagtggaaggtggataacgccctccaatcgggtaactcccaggagagtgtcacagagcaggacagcaaggacagcacctacagcctcagcagcaccctgac

SEQ ID NO: 26741 - DNA, 675 bp, synthetic construct
  source 1..675: mol_type = other DNA
tgantnnncaggactcctcagttcaccttctcacaatgaggctccctgctcagctcctggggctgctaatgctctgggtctctggatccagtggggatattgtgatgactcagtctccactctccctgcccgtcacccctggagagccggcctccatctcctgcaggtctagtcagagcctccgccatagtaatggatacaactatttgggttggtatgtgcagaagccagggcagtctccacagctcctgatctatttggcttctaatcgggcccccggggtccctgacaggttcagtggcagtggatcaggcacagattttacactgaaaatcagcacagtggaggctgaggatgttggggtttattactgcatgcaacctcttcaaactccttacacttttggccaggggaccaagctagagatcaaacgaactgtggctgcaccatctgtcttcatcttcccgccatctgatgagcagttgaaatctggaactgcctctgttgtgtgcctgctgaataacttctatcccagagaggccaaagtacagtggaaggtggataacgccctccaatcgggtaactcccaggagagtgtcacagagcaggacagcaaggacagcacctacagcctcagcagcaccctgacgctgagcaaagcagactacgagnaac

SEQ ID NO: 26742 - DNA, 646 bp, synthetic construct
  source 1..646: mol_type = other DNA
gtcccaaccaggacacagcatggacatgagggtccctgctcagctcctggggctcctgctgctctggctctcaggtgtcagatgtgacatccagatgacccagtctccatcctccctgtctgcatctgtaggagacagagtcaccatcacttgccaggcgagtgaggacattagcacctatttaagttggtatcagcagaaaccagggaaagcccctaacctcctgatctacggtgcatccaatttggaaacaggggtcccatcgcggttcagtggaagtggatctgagacagattttactttcaccatcagcagcctgcagcctgaagatattgcaacttattactgtcagcagtatgataatctccctctcactttcggcggagggaccaaggtggacatcaaacgaactgtggctgcaccatctgtcttcatcttcccgccatctgatgagcagttgaaatctggaactgcctctgttgtgtgcctgctgaataacttctatcccagagaggccaaagtacagtggaaggtggataacgccctccaatcgggtaactcccaggagagtgtcacagagcaggacagcaaggacagcacctacagcctcagcagcaccctgacgctgagcaaagcagactacgag

SEQ ID NO: 26743 - DNA, 102 bp, synthetic construct
  source 1..102: mol_type = other DNA
actggtccagtcccagggctctgggtccagcctggccctgactctgagctcaccagggcccccgcctgtggtgggncggatcctcatgaccctactgcngnt

SEQ ID NO: 26744 - DNA, 405 bp, synthetic construct
  source 1..405: mol_type = other DNA
aactcgaagcggccctcagggatccctgaccgattctcgggctccaagtctggggacaccgccactctgaccatcagggggacccagtctgaggatgagggtgactactattgtcagacgtgggagaccacaactctgattttcggcggagggaccaagctgaccgtcctaggtcagcccaaggctgccccctcggtcactctgttcccgccctcgtctgaggagcttcaagccaacaaggccacactggtgtgtctcataagtgacttctacccgggagtcgtgacagtggcctggaaggcagatagcagccccgtcaaggcgggagtggagaccaccacaccctccaaacaaagcaacaacaagtacgcggccagcagctatctgagcctgacgcctgagcag

SEQ ID NO: 26745 - DNA, 159 bp, synthetic construct
  source 1..159: mol_type = other DNA
gcacaggatcggaggcctcctctggactgactcagccaccctcagtgtccgtgtccccgggacagacagccattgtcacctgttctggagagacattgcgtgatgagtttgttgcctggtatcaacagcgggcagaccagtctcctgtcctggtcatat

SEQ ID NO: 26746 - DNA, 663 bp, synthetic construct
  source 1..663: mol_type = other DNA
gtcagacccagtcaggacacagcatggacatgagggtccccgctcagctcctggggctcctgctgctctggttcccaggttccagatgcgacatccagatgacccagtctccatcttccgtgtctgcatctgtaggagacagagtcaccgtcacttgtcgggcgagtcagcctattgccggctggttagcctggtatcagcagaaaccggggaaagcccctaaactcctcatctatactgcatccactttgcaaagtggggtcccatccaggttcagcggcagtgggtctgggacagattacactctcaccatcagcagcctgcagccagaagattttgcaacttactattgtcaacagactaacagtttccctctcactttcggcggagggaccaaggtggagatgaaacgaactgtggctgcaccatctgtcttcatcttcccgccatctgatgagcagttgaaatctggaactgcctctgttgtgtgcctgctgaataacttctatcccagagaggccaaagtacagtggaaggtggataacgccctccaatcgggtaactcccaggagagtgtcacagagcaggacagcaaggacagcacctacagcctcagcagcaccctgacgctgagcaaagcagactacgagaaacacaaagtct

SEQ ID NO: 26747 - DNA, 694 bp, synthetic construct
  source 1..694: mol_type = other DNA
tgatgagcagttgaaatctggaactgcctctgttgtgtgcctgcnngctctggagaagagctgctcagttaggacccagagggaaccatggaaaccccagcgcagcttctcttcctcctgctactctggctcccagataccaccggagaaattgtgttgacgcagtctccaggcaccctgtctttgtctccaggggaaagagccaccctctcctgcagggccagtcagagtattagcagcagctacttagcctggtaccagcagaaacctggccaggctcccaggctcctcatctatagtgcatccagcagggacactggcatcccagacaggttcagtggcagtgggtctgggacagacttcactctcaccatcaccagactggagcctgaagattttgcagtgtattactgtcagcagtatggtaactcacggacgttcggccaagggaccaaggtggaagtcaaacgaactgtggctgcaccatctgtcttcatcttcccgccatctgatgagcagttgaaatctggaactgcctctgttgtgtgcctgctgaataacttctatcccagagaggccaaagtacagtggaaggtggataacgccctccaatcgggtaactcccaggagagtgtcacagagcaggacagcaaggacagcacctacagcctcagcagcaccctgacnnngnnna

SEQ ID NO: 26748 - DNA, 21 bp, synthetic construct
  source 1..21: mol_type = other DNA
gagaaacacaaagtctacgcc

SEQ ID NO: 26749 - DNA, 666 bp, synthetic construct
  source 1..666: mol_type = other DNA
gcctagctgtgctgtgggtccaggaggcagaactctgggtgtctcaccatggcctggatccctctacttctccccctcctcactctctgcacaggctctgaggcctcctatgagctgacacagccaccctcggtgtcagtgtccccaggacagacggccaggatcacctgctctggagatgcattgccaaaacaatatacttattggtaccagcagaaaccaggccaggcccctatgttgatgatctctaaagacagtgagaggccctcagggatccctgagcgattctctggctccacctcagggacaattgtcacattgatcatcagtggagtccaggcagaagacgaggctgactattactgtcaatcaggagacagtagtggtccttgggtgttcggcggggggaccaagctgaccgtcctaggtcagcccaaggctgccccctcggtcactctgttcccgccctcctctgaggagcttcaagccaacaaggccacactggtgtgtctcataagtgacttctacccgggagccgtgacagtggcctggaaggcagatagcagccccgtcaaggcgggagtggagaccaccacaccctccaaacaaagcaacaacaagtacgcggccagcagctacctgagcctgacgcctgagcagtggaag

SEQ ID NO: 26750 - DNA, 43 bp, synthetic construct
  source 1..43: mol_type = other DNA
acgcctgcgaagtcacccatcagggcctgnncnnnncnntnnc

SEQ ID NO: 26751 - DNA, 669 bp, synthetic construct
  source 1..669: mol_type = other DNA
ctctggggaggaactgctcagttaggacccagagggaaccatggaaaccccagcgcagcttctcttcctcctgctactctggctcccagatatcaccggagaaatcgtcttgacgcagtctccagccacgttgtcattgtctccaggggaaagagccaccctctcctgcggggccaatcagactgttgacaagaactatttagcctggtaccgacagaaacctggcctggcgcccagtctcctcatctacgctgcatctctcagggccactgacatccccgacaggttcactggcagtgggtctgggacagacttcagtctcacgataagcagagtggagcctgaagattttgcagtgtattactgtcagcagtatggaaggacaccgcttactttcggcggagggaccaaggtggagatcaaacgaactgtggctgcaccatctgtcttcatcttcccgccatctgatgagcagttgaaatctggaactgcctctgttgtgtgcctgctgaataacttctatcccagagaggccaaagtacagtggaaggtggataacgccctccaatcgggtaactcccaggagagtgtcacagagcaggacagcaaggacagcacctacagcctcagcagcaccctgacgctgagcaaagcagactacgagaaacg

SEQ ID NO: 26752 - DNA, 58 bp, synthetic construct
  source 1..58: mol_type = other DNA
tgcataggcccctccaggccacgaccagctgtttggattttataaacgggccgtttgc

SEQ ID NO: 26753 - DNA, 678 bp, synthetic construct
  source 1..678: mol_type = other DNA
gaactgagctacaacaggcaggcaggggcagcaagatggtgttgcagacccaggtcttcatttctctgttgctctggatctctggtgccttcggggacatcgtgatgacccagtctccagactccctggctgtgtctctgggcgagagggccaccatcaactgcaagtccagtcagactcttttatacaagttcaacaataaggaatacttggcttggtaccagcagaaaccaggacagcctcctaaattgctcatgtattgggcatcaacccgggagtccggggtccctgaccgattcagtggcagcgggtctgggacagatttcactctcaccatcagccgcctgcagcctgaagatgtggcaatttattactgtcagcaatattttacaactcctttcgcgttcggccaagggaccaaggtggaaatcaaacgaactgtggctgcaccatctgtcttcatcttcccgccatctgatgagcagttgaaatctggaactgcctctgttgtgtgcctgctgaataacttctatcccagagaggccaaagtacagtggaaggtggataacgccctccaatcgggtaactcccaggagagtgtcacagagcaggacagcaaggacagcacctacagcctcagcagcaccctgacgctgagcaaagcagactacgagaaac

SEQ ID NO: 26754 - DNA, 42 bp, synthetic construct
  source 1..42: mol_type = other DNA
catggatggactctccccctctcagagtatgaagagagggag

SEQ ID NO: 26755 - DNA, 81 bp, synthetic construct
  source 1..81: mol_type = other DNA
ctgggggaagctcagcttcagctgtgggtagagaagacaggactcaggacaatctccagcatggccagcttccctctcctc

SEQ ID NO: 26756 - DNA, 581 bp, synthetic construct
  source 1..581: mol_type = other DNA
gggtcctgggcccagtctgtgctgactcagccaccctcagtgtctgggacccccgggcagagggtcaccatctcttgttctggaagccgctccaacatcggaagtaatactgtaaactggtaccaacacctcccaggaacggcccccaaactcctcctctatagtacttatcagcgaccctcgggggtccctgaccgattctctggctccaagtctggcacctcagcctccctggccatcagtgggctccactctgaggatgacgctgatttttactgtgcagcatgggatgacagcctgaatgttgtggtgttcggcggagggaccaagctgaccgtcctaagtcagcccaaggctgccccctcggtcactctgttcccgccctcctctgaggagcttcaagccaacaaggccacactggtgtgtctcataagtgacttctacccgggagccgtgacagtggcctggaaggcagatggcagccccgtcaacgcgggagtggagaccaccacaccctccaaactaagcaacaacaagtacgcggccagcagctatctgagcctgacgcctgagcagtggag

SEQ ID NO: 26757 - DNA, 658 bp, synthetic construct
  source 1..658: mol_type = other DNA
ccacggnngacccantcaggacacagcatggacatgagggtccccgctcagctcctggggctcctgctgctctggttcccaggttgcagatgcgacatccggctgacccagtcaccttcttctgtggccgcttctataggagacagagtcaccatcacctgtcgggcgagtcaagacattaacaattggttagcctggtatcagcaacagccggggaaagcccctaggctcctgatctatgctgcgtccactttgcagagtggggtcccatcaagattcagcggcagtggatctgggacatatttcactctcactatcagcagcctgcagggttcagattttgcaacttactattgtcaacaggcttacagattccccctctctttcggcggagggaccaaggtggacatcaagcgaactgtggctgcaccatctgtcttcatcttcccgccatctgatgagcagttgaaatctggaactgcctctgttgtgtgcctgctgaataacttctatcccagagaggccaaagtacagtggaaggtggataacgccctccaatcgggtaactcccaggagagtgtcacagagcaggacagcaaggacagcacctacagcctcagcagcaccctgacgctgagcaaagcagactacgagnaac

SEQ ID NO: 26758 - DNA, 661 bp, synthetic construct
  source 1..661: mol_type = other DNA
ggtctcaggaggcagcgctctcaggacatctccaccatggcctgggctctgctgctcctcaccctcctcactcagggcacagggtcctgggcccagtctgccctgactcagcctgcctccgtgtctgggtctcctggacagtcgatcaccatctcctgcactggacccagcagtgacgttgctggttataactttgtctcctggtaccaacaacacccaggcaaagcccccaaactcataatttatgaggtcaccaatcggccctcaggggtttctaatcgcttctctggctccaagtctggcaccacggcctccctgaccatctctgggctccaggctgaggacgaggctgaatattactgcagctcttatttcatcagcaggcatgtggtgttcggcggagggaccagggtgaccgtcctgggtcagcccaaggctgccccctcggtcactctgttcccgccctcctctgaggagcttcaagccaacaaggccacactggtgtgtctcataagtgacttctacccgggagccgtgacagtggcctggaaggcagatagcagccccgtcaaggcgggagtggagaccaccacaccctccaaacaaagcaacaacaagtacgcggccagcagctatctgagcctgacgcctgagcagtgga

SEQ ID NO: 26759 - DNA, 75 bp, synthetic construct
  source 1..75: mol_type = other DNA
tcctatgttctgactcagccaccctcagtgtcagcggccccaggacagacggccaggattgtctgtggcggagac

SEQ ID NO: 26760 - DNA, 78 bp, synthetic construct
  source 1..78: mol_type = other DNA
gacatccagatgacccagtctccatccatcctgtctgcatctgtaggagacagagtcactctcacttgccgggccagt

SEQ ID NO: 26761 - DNA, 78 bp, synthetic construct
  source 1..78: mol_type = other DNA
gatattgtgatgactcagtctccactctccctgcccgtcacccctggagagccggcctccatctcctgcaggtctagt

SEQ ID NO: 26762 - DNA, 78 bp, synthetic construct
  source 1..78: mol_type = other DNA
gacatccagatgacccagtctccatcctccctgtctgcatctgtaggagacagagtcaccatcacttgccaggcgagt

SEQ ID NO: 26763 - DNA, 75 bp, synthetic construct
  source 1..75: mol_type = other DNA
tcctctggactgactcagccaccctcagtgtccgtgtccccgggacagacagccattgtcacctgttctggagag

SEQ ID NO: 26764 - DNA, 78 bp, synthetic construct
  source 1..78: mol_type = other DNA
gacatccagatgacccagtctccatcttccgtgtctgcatctgtaggagacagagtcaccgtcacttgtcgggcgagt

SEQ ID NO: 26765 - DNA, 78 bp, synthetic construct
  source 1..78: mol_type = other DNA
gaaattgtgttgacgcagtctccaggcaccctgtctttgtctccaggggaaagagccaccctctcctgcagggccagt

SEQ ID NO: 26766 - DNA, 75 bp, synthetic construct
  source 1..75: mol_type = other DNA
tcctatgagctgacacagccaccctcggtgtcagtgtccccaggacagacggccaggatcacctgctctggagat

SEQ ID NO: 26767 - DNA, 78 bp, synthetic construct
  source 1..78: mol_type = other DNA
gaaatcgtcttgacgcagtctccagccacgttgtcattgtctccaggggaaagagccaccctctcctgcggggccaat

SEQ ID NO: 26768 - DNA, 78 bp, synthetic construct
  source 1..78: mol_type = other DNA
gacatcgtgatgacccagtctccagactccctggctgtgtctctgggcgagagggccaccatcaactgcaagtccagt

SEQ ID NO: 26769 - DNA, 75 bp, synthetic construct
  source 1..75: mol_type = other DNA
cagtctgtgctgactcagccaccctcagtgtctgggacccccgggcagagggtcaccatctcttgttctggaagc

SEQ ID NO: 26770 - DNA, 78 bp, synthetic construct
  source 1..78: mol_type = other DNA
gacatccggctgacccagtcaccttcttctgtggccgcttctataggagacagagtcaccatcacctgtcgggcgagt

SEQ ID NO: 26771 - DNA, 75 bp, synthetic construct
  source 1..75: mol_type = other DNA
cagtctgccctgactcagcctgcctccgtgtctgggtctcctggacagtcgatcaccatctcctgcactggaccc

SEQ ID NO: 26772 - DNA, 18 bp, synthetic construct
  source 1..18: mol_type = other DNA
aacattggaagtaaaact

SEQ ID NO: 26773 - DNA, 18 bp, synthetic construct
  source 1..18: mol_type = other DNA
ctgagtattaatagatgg

SEQ ID NO: 26774 - DNA, 33 bp, synthetic construct
  source 1..33: mol_type = other DNA
cagagcctccgccatagtaatggatacaactat

SEQ ID NO: 26775 - DNA, 18 bp, synthetic construct
  source 1..18: mol_type = other DNA
gaggacattagcacctat

SEQ ID NO: 26776 - DNA, 18 bp, synthetic construct
  source 1..18: mol_type = other DNA
acattgcgtgatgagttt

SEQ ID NO: 26777 - DNA, 18 bp, synthetic construct
  source 1..18: mol_type = other DNA
cagcctattgccggctgg

SEQ ID NO: 26778 - DNA, 21 bp, synthetic construct
  source 1..21: mol_type = other DNA
cagagtattagcagcagctac

SEQ ID NO: 26779 - DNA, 18 bp, synthetic construct
  source 1..18: mol_type = other DNA
gcattgccaaaacaatat

SEQ ID NO: 26780 - DNA, 21 bp, synthetic construct
  source 1..21: mol_type = other DNA
cagactgttgacaagaactat

SEQ ID NO: 26781 - DNA, 36 bp, synthetic construct
  source 1..36: mol_type = other DNA
cagactcttttatacaagttcaacaataaggaatac

SEQ ID NO: 26782 - DNA, 24 bp, synthetic construct
  source 1..24: mol_type = other DNA
cgctccaacatcggaagtaatact

SEQ ID NO: 26783 - DNA, 18 bp, synthetic construct
  source 1..18: mol_type = other DNA
caagacattaacaattgg

SEQ ID NO: 26784 - DNA, 27 bp, synthetic construct
  source 1..27: mol_type = other DNA
agcagtgacgttgctggttataacttt

SEQ ID NO: 26785 - DNA, 51 bp, synthetic construct
  source 1..51: mol_type = other DNA
gtgcactggtaccagcagaagccaggccaggcccctgtcttggtcatctat

SEQ ID NO: 26786 - DNA, 51 bp, synthetic construct
  source 1..51: mol_type = other DNA
gtggcctggtatcaacaaaaaccagggaaagcccctaaagtcctgatctat

SEQ ID NO: 26787 - DNA, 51 bp, synthetic construct
  source 1..51: mol_type = other DNA
ttgggttggtatgtgcagaagccagggcagtctccacagctcctgatctat

SEQ ID NO: 26788 - DNA, 51 bp, synthetic construct
  source 1..51: mol_type = other DNA
ttaagttggtatcagcagaaaccagggaaagcccctaacctcctgatctac

SEQ ID NO: 26789 - DNA, 51 bp, synthetic construct
  source 1..51: mol_type = other DNA
ttagcctggtatcagcagaaaccggggaaagcccctaaactcctcatctat

SEQ ID NO: 26790 - DNA, 51 bp, synthetic construct
  source 1..51: mol_type = other DNA
ttagcctggtaccagcagaaacctggccaggctcccaggctcctcatctat

SEQ ID NO: 26791 - DNA, 51 bp, synthetic construct
  source 1..51: mol_type = other DNA
acttattggtaccagcagaaaccaggccaggcccctatgttgatgatctct

SEQ ID NO: 26792 - DNA, 51 bp, synthetic construct
  source 1..51: mol_type = other DNA
ttagcctggtaccgacagaaacctggcctggcgcccagtctcctcatctac

SEQ ID NO: 26793 - DNA, 51 bp, synthetic construct
  source 1..51: mol_type = other DNA
ttggcttggtaccagcagaaaccaggacagcctcctaaattgctcatgtat

SEQ ID NO: 26794 - DNA, 51 bp, synthetic construct
  source 1..51: mol_type = other DNA
gtaaactggtaccaacacctcccaggaacggcccccaaactcctcctctat

SEQ ID NO: 26795 - DNA, 51 bp, synthetic construct
  source 1..51: mol_type = other DNA
ttagcctggtatcagcaacagccggggaaagcccctaggctcctgatctat

SEQ ID NO: 26796 - DNA, 51 bp, synthetic construct
  source 1..51: mol_type = other DNA
gtctcctggtaccaacaacacccaggcaaagcccccaaactcataatttat

SEQ ID NO: 26797 - DNA, 105 bp, synthetic construct
  source 1..105: mol_type = other DNA
ggccggccctcagggatccctgagcgattttctggctccaactctgggaacgcggccaccctcaccatcagcagggtcgaacccggggatgaggccgactattac

SEQ ID NO: 26798 - DNA, 105 bp, synthetic construct
  source 1..105: mol_type = other DNA
attttagaaagtggggtcccattaaggttcagcggcagtggatctgagacagaattcactctcaccatcagcagcctgcagcctgatgattttgcaacctattac

SEQ ID NO: 26799 - DNA, 105 bp, synthetic construct
  source 1..105: mol_type = other DNA
aatcgggcccccggggtccctgacaggttcagtggcagtggatcaggcacagattttacactgaaaatcagcacagtggaggctgaggatgttggggtttattac

SEQ ID NO: 26800 - DNA, 105 bp, synthetic construct
  source 1..105: mol_type = other DNA
aatttggaaacaggggtcccatcgcggttcagtggaagtggatctgagacagattttactttcaccatcagcagcctgcagcctgaagatattgcaacttattac

SEQ ID NO: 26801 - DNA, 105 bp, synthetic construct
  source 1..105: mol_type = other DNA
aagcggccctcagggatccctgaccgattctcgggctccaagtctggggacaccgccactctgaccatcagggggacccagtctgaggatgagggtgactactat

SEQ ID NO: 26802 - DNA, 105 bp, synthetic construct
  source 1..105: mol_type = other DNA
actttgcaaagtggggtcccatccaggttcagcggcagtgggtctgggacagattacactctcaccatcagcagcctgcagccagaagattttgcaacttactat

SEQ ID NO: 26803 - DNA, 105 bp, synthetic construct
  source 1..105: mol_type = other DNA
agcagggacactggcatcccagacaggttcagtggcagtgggtctgggacagacttcactctcaccatcaccagactggagcctgaagattttgcagtgtattac

SEQ ID NO: 26804 - DNA, 105 bp, synthetic construct
  source 1..105: mol_type = other DNA
gagaggccctcagggatccctgagcgattctctggctccacctcagggacaattgtcacattgatcatcagtggagtccaggcagaagacgaggctgactattac

SEQ ID NO: 26805 - DNA, 105 bp, synthetic construct
  source 1..105: mol_type = other DNA
ctcagggccactgacatccccgacaggttcactggcagtgggtctgggacagacttcagtctcacgataagcagagtggagcctgaagattttgcagtgtattac

SEQ ID NO: 26806 - DNA, 105 bp, synthetic construct
  source 1..105: mol_type = other DNA
acccgggagtccggggtccctgaccgattcagtggcagcgggtctgggacagatttcactctcaccatcagccgcctgcagcctgaagatgtggcaatttattac

SEQ ID NO: 26807 - DNA, 105 bp, synthetic construct
  source 1..105: mol_type = other DNA
cagcgaccctcgggggtccctgaccgattctctggctccaagtctggcacctcagcctccctggccatcagtgggctccactctgaggatgacgctgatttttac

SEQ ID NO: 26808 - DNA, 105 bp, synthetic construct
  source 1..105: mol_type = other DNA
actttgcagagtggggtcccatcaagattcagcggcagtggatctgggacatatttcactctcactatcagcagcctgcagggttcagattttgcaacttactat

SEQ ID NO: 26809 - DNA, 105 bp, synthetic construct
  source 1..105: mol_type = other DNA
aatcggccctcaggggtttctaatcgcttctctggctccaagtctggcaccacggcctccctgaccatctctgggctccaggctgaggacgaggctgaatattac

SEQ ID NO: 26810 - DNA, 39 bp, synthetic construct
  source 1..39: mol_type = other DNA
tgtcacgtgtgggatagtagtgctgatcgtcacgtcttc

SEQ ID NO: 26811 - DNA, 33 bp, synthetic construct
  source 1..33: mol_type = other DNA
tgccaacaatataatatgtacccgtacactttt

SEQ ID NO: 26812 - DNA, 33 bp, synthetic construct
  source 1..33: mol_type = other DNA
tgcatgcaacctcttcaaactccttacactttt

SEQ ID NO: 26813 - DNA, 33 bp, synthetic construct
  source 1..33: mol_type = other DNA
tgtcagcagtatgataatctccctctcactttc

SEQ ID NO: 26814 - DNA, 33 bp, synthetic construct
  source 1..33: mol_type = other DNA
tgtcagacgtgggagaccacaactctgattttc

SEQ ID NO: 26815 - DNA, 33 bp, synthetic construct
  source 1..33: mol_type = other DNA
tgtcaacagactaacagtttccctctcactttc

SEQ ID NO: 26816 - DNA, 30 bp, synthetic construct
  source 1..30: mol_type = other DNA
tgtcagcagtatggtaactcacggacgttc

SEQ ID NO: 26817 - DNA, 36 bp, synthetic construct
  source 1..36: mol_type = other DNA
tgtcaatcaggagacagtagtggtccttgggtgttc

SEQ ID NO: 26818 - DNA, 33 bp, synthetic construct
  source 1..33: mol_type = other DNA
tgtcagcagtatggaaggacaccgcttactttc

SEQ ID NO: 26819 - DNA, 33 bp, synthetic construct
  source 1..33: mol_type = other DNA
tgtcagcaatattttacaactcctttcgcgttc

SEQ ID NO: 26820 - DNA, 39 bp, synthetic construct
  source 1..39: mol_type = other DNA
tgtgcagcatgggatgacagcctgaatgttgtggtgttc

SEQ ID NO: 26821 - DNA, 33 bp, synthetic construct
  source 1..33: mol_type = other DNA
tgtcaacaggcttacagattccccctctctttc

SEQ ID NO: 26822 - DNA, 36 bp, synthetic construct
  source 1..36: mol_type = other DNA
tgcagctcttatttcatcagcaggcatgtggtgttc

SEQ ID NO: 26823 - DNA, 28 bp, synthetic construct
  source 1..28: mol_type = other DNA
ggaactgggaccaaggtcaccgtcctag

SEQ ID NO: 26824 - DNA, 28 bp, synthetic construct
  source 1..28: mol_type = other DNA
ggccaggggaccgagctggagatcaaac

SEQ ID NO: 26825 - DNA, 28 bp, synthetic construct
  source 1..28: mol_type = other DNA
ggccaggggaccaagctagagatcaaac

SEQ ID NO: 26826 - DNA, 28 bp, synthetic construct
  source 1..28: mol_type = other DNA
ggcggagggaccaaggtggacatcaaac

SEQ ID NO: 26827 - DNA, 28 bp, synthetic construct
  source 1..28: mol_type = other DNA
ggcggagggaccaagctgaccgtcctag

SEQ ID NO: 26828 - DNA, 28 bp, synthetic construct
  source 1..28: mol_type = other DNA
ggcggagggaccaaggtggagatgaaac

SEQ ID NO: 26829 - DNA, 28 bp, synthetic construct
  source 1..28: mol_type = other DNA
ggccaagggaccaaggtggaagtcaaac

SEQ ID NO: 26830 - DNA, 28 bp, synthetic construct
  source 1..28: mol_type = other DNA
ggcggggggaccaagctgaccgtcctag

SEQ ID NO: 26831 - DNA, 28 bp, synthetic construct
  source 1..28: mol_type = other DNA
ggcggagggaccaaggtggagatcaaac

SEQ ID NO: 26832 - DNA, 28 bp, synthetic construct
  source 1..28: mol_type = other DNA
ggccaagggaccaaggtggaaatcaaac

SEQ ID NO: 26833 - DNA, 28 bp, synthetic construct
  source 1..28: mol_type = other DNA
ggcggagggaccaagctgaccgtcctaa

SEQ ID NO: 26834 - DNA, 28 bp, synthetic construct
  source 1..28: mol_type = other DNA
ggcggagggaccaaggtggacatcaagc

SEQ ID NO: 26835 - DNA, 28 bp, synthetic construct
  source 1..28: mol_type = other DNA
ggcggagggaccagggtgaccgtcctgg

SEQ ID NO: 26836 - protein, 25 aa, synthetic construct
SYVLTQPPSVSAAPGQTARIVCGGD

SEQ ID NO: 26837 - protein, 26 aa, synthetic construct
DIQMTQSPSILSASVGDRVTLTCRAS

SEQ ID NO: 26838 - protein, 26 aa, synthetic construct
DIVMTQSPLSLPVTPGEPASISCRSS

SEQ ID NO: 26839 - protein, 26 aa, synthetic construct
DIQMTQSPSSLSASVGDRVTITCQAS

SEQ ID NO: 26840 - protein, 25 aa, synthetic construct
SSGLTQPPSVSVSPGQTAIVTCSGE

SEQ ID NO: 26841 - protein, 26 aa, synthetic construct
DIQMTQSPSSVSASVGDRVTVTCRAS

SEQ ID NO: 26842 - protein, 26 aa, synthetic construct [sequence omitted]

SEQ ID NO: 26843 - protein, 25 aa, synthetic construct
SYELTQPPSVSVSPGQTARITCSGD

SEQ ID NO: 26844 - protein, 26 aa, synthetic construct
EIVLTQSPATLSLSPGERATLSCGAN

SEQ ID NO: 26845 - protein, 26 aa, synthetic construct
DIVMTQSPDSLAVSLGERATINCKSS

SEQ ID NO: 26846 - protein, 25 aa, synthetic construct
QSVLTQPPSVSGTPGQRVTISCSGS

SEQ ID NO: 26847 - protein, 26 aa, synthetic construct
DIRLTQSPSSVAASIGDRVTITCRAS

SEQ ID NO: 26848 - protein, 25 aa, synthetic construct
QSALTQPASVSGSPGQSITISCTGP

SEQ ID NO: 26849 - protein, 6 aa, synthetic construct
NIGSKT

SEQ ID NO: 26850 - protein, 6 aa, synthetic construct
LSINRW

SEQ ID NO: 26851 - protein, 11 aa, synthetic construct
QSLRHSNGYNY

SEQ ID NO: 26852 - protein, 6 aa, synthetic construct
EDISTY

SEQ ID NO: 26853 - protein, 6 aa, synthetic construct
TLRDEF

SEQ ID NO: 26854 - protein, 6 aa, synthetic construct
QPIAGW

SEQ ID NO: 26855 - protein, 7 aa, synthetic construct
QSISSSY

SEQ ID NO: 26856 - protein, 6 aa, synthetic construct
ALPKQY

SEQ ID NO: 26857 - protein, 7 aa, synthetic construct
QTVDKNY

SEQ ID NO: 26858 - protein, 12 aa, synthetic construct
QTLLYKFNNKEY

SEQ ID NO: 26859 - protein, 8 aa, synthetic construct
RSNIGSNT

SEQ ID NO: 26860 - protein, 6 aa, synthetic construct
QDINNW

SEQ ID NO: 26861 - protein, 9 aa, synthetic construct
SSDVAGYNF

SEQ ID NO: 26862 - protein, 17 aa, synthetic construct
VHWYQQKPGQAPVLVIY

SEQ ID NO: 26863 - protein, 17 aa, synthetic construct
VAWYQQKPGKAPKVLIY

SEQ ID NO: 26864 - protein, 17 aa, synthetic construct
LGWYVQKPGQSPQLLIY

SEQ ID NO: 26865 - protein, 17 aa, synthetic construct
LSWYQQKPGKAPNLLIY

SEQ ID NO: 26866 - protein, 17 aa, synthetic construct
LAWYQQKPGKAPKLLIY

SEQ ID NO: 26867 - protein, 17 aa, synthetic construct
LAWYQQKPGQAPRLLIY

SEQ ID NO: 26868 - protein, 17 aa, synthetic construct
TYWYQQKPGQAPMLMIS

SEQ ID NO: 26869 - protein, 17 aa, synthetic construct
LAWYRQKPGLAPSLLIY

SEQ ID NO: 26870 - protein, 17 aa, synthetic construct
LAWYQQKPGQPPKLLMY

SEQ ID NO: 26871 - protein, 17 aa, synthetic construct
VNWYQHLPGTAPKLLLY

SEQ ID NO: 26872 - protein, 17 aa, synthetic construct
LAWYQQQPGKAPRLLIY

SEQ ID NO: 26873 - protein, 17 aa, synthetic construct
VSWYQQHPGKAPKLIIY

SEQ ID NO: 26874 - protein, 35 aa, synthetic construct
GRPSGIPERFSGSNSGNAATLTISRVEPGDEADYY

SEQ ID NO: 26875 - protein, 35 aa, synthetic construct
ILESGVPLRFSGSGSETEFTLTISSLQPDDFATYY

SEQ ID NO: 26876 - protein, 35 aa, synthetic construct
NRAPGVPDRFSGSGSGTDFTLKISTVEAEDVGVYY

SEQ ID NO: 26877 - protein, 35 aa, synthetic construct
NLETGVPSRFSGSGSETDFTFTISSLQPEDIATYY

SEQ ID NO: 26878 - protein, 35 aa, synthetic construct
KRPSGIPDRFSGSKSGDTATLTIRGTQSEDEGDYY

SEQ ID NO: 26879 - protein, 35 aa, synthetic construct
TLQSGVPSRFSGSGSGTDYTLTISSLQPEDFATYY

SEQ ID NO: 26880 - protein, 35 aa, synthetic construct
SRDTGIPDRFSGSGSGTDFTLTITRLEPEDFAVYY

SEQ ID NO: 26881 - protein, 35 aa, synthetic construct
ERPSGIPERFSGSTSGTIVTLIISGVQAEDEADYY

SEQ ID NO: 26882 - protein, 35 aa, synthetic construct
LRATDIPDRFTGSGSGTDFSLTISRVEPEDFAVYY

SEQ ID NO: 26883 - protein, 35 aa, synthetic construct
TRESGVPDRFSGSGSGTDFTLTISRLQPEDVAIYY

SEQ ID NO: 26884 - protein, 35 aa, synthetic construct
QRPSGVPDRFSGSKSGTSASLAISGLHSEDDADFY

SEQ ID NO: 26885 - protein, 35 aa, synthetic construct
TLQSGVPSRFSGSGSGTYFTLTISSLQGSDFATYY

SEQ ID NO: 26886 - protein, 35 aa, synthetic construct
NRPSGVSNRFSGSKSGTTASLTISGLQAEDEAEYY

SEQ ID NO: 26887 - protein, 13 aa, synthetic construct
CHVWDSSADRHVF

SEQ ID NO: 26888 - protein, 11 aa, synthetic construct [sequence omitted]

SEQ ID NO: 26889 - protein, 11 aa, synthetic construct [sequence omitted]

SEQ ID NO: 26890 - protein, 11 aa, synthetic construct [sequence omitted]

SEQ ID NO: 26891 - protein, 11 aa, synthetic construct
CQTWETTTLIF

SEQ ID NO: 26892 - protein, 11 aa, synthetic construct [sequence omitted]

SEQ ID NO: 26893 - protein, 10 aa, synthetic construct [sequence omitted]

SEQ ID NO: 26894 - protein, 12 aa, synthetic construct
CQSGDSSGPWVF

SEQ ID NO: 26895 - protein, 11 aa, synthetic construct [sequence omitted]

SEQ ID NO: 26896 - protein, 11 aa, synthetic construct
CQQYFTTPFAF

SEQ ID NO: 26897 - protein, 13 aa, synthetic construct [sequence omitted]

SEQ ID NO: 26898 - protein, 11 aa, synthetic construct
CQQAYRFPLSF

SEQ ID NO: 26899 - protein, 12 aa, synthetic construct
CSSYFISRHVVF

SEQ ID NO: 26900 - protein, 9 aa, synthetic construct
GTGTKVTVL

SEQ ID NO: 26901 - protein, 9 aa, synthetic construct
GQGTELEIK

SEQ ID NO: 26902 - protein, 9 aa, synthetic construct
GQGTKLEIK

SEQ ID NO: 26903 - protein, 9 aa, synthetic construct
GGGTKVDIK

SEQ ID NO: 26904 - protein, 9 aa, synthetic construct
GGGTKLTVL

SEQ ID NO: 26905 - protein, 9 aa, synthetic construct
GGGTKVEMK

SEQ ID NO: 26906 - protein, 9 aa, synthetic construct
GQGTKVEVK

SEQ ID NO: 26907 - protein, 9 aa, synthetic construct
GGGTKVEIK

SEQ ID NO: 26908 - protein, 9 aa, synthetic construct
GQGTKVEIK

SEQ ID NO: 26909 - protein, 9 aa, synthetic construct
GGGTRVTVL

SEQ ID NO: 26910 - protein, 96 aa, synthetic construct
SYVLTQPPSVSVAPGKTARITCGGNNIGSKSVHWYQQKPGQAPVLVIYYDSDRPSGIPERFSGSNSGNTATLTISRVEAGDEADYYCQVWDSSSDH

SEQ ID NO: 26911 - protein, 95 aa, synthetic construct
DIQMTQSPSTLSASVGDRVTITCRASQSISSWLAWYQQKPGKAPKLLIYDASSLESGVPSRFSGSGSGTEFTLTISSLQPDDFATYYCQQYNSYS

SEQ ID NO: 26912 - protein, 100 aa, synthetic construct
DIVMTQSPLSLPVTPGEPASISCRSSQSLLHSNGYNYLDWYLQKPGQSPQLLIYLGSNRASGVPDRFSGSGSGTDFTLKISRVEAEDVGVYYCMQALQTP

SEQ ID NO: 26913 - protein, 95 aa, synthetic construct
DIQMTQSPSSLSASVGDRVTITCQASQDISNYLNWYQQKPGKAPKLLIYDASNLETGVPSRFSGSGSGTDFTFTISSLQPEDIATYYCQQYDNLP

SEQ ID NO: 26914 - protein, 95 aa, synthetic construct
SYELTQPPSVSVSPGQTASITCSGDKLGDKYACWYQQKPGQSPVLVIYQDSKRPSGIPERFSGSNSGNTATLTISGTQAMDEADYYCQAWDSSTA

SEQ ID NO: 26915 - protein, 95 aa, synthetic construct
DIQMTQSPSSVSASVGDRVTITCRASQGISSWLAWYQQKPGKAPKLLIYAASSLQSGVPSRFSGSGSGTDFTLTISSLQPEDFATYYCQQANSFP

SEQ ID NO: 26916 - protein, 96 aa, synthetic construct
EIVLTQSPGTLSLSPGERATLSCRASQSVSSSYLAWYQQKPGQAPRLLIYGASSRATGIPDRFSGSGSGTDFTLTISRLEPEDFAVYYCQQYGSSP

SEQ ID NO: 26917 - protein, 96 aa, synthetic construct
SYELMQPPSVSVSPGQTARITCSGDALPKQYAYWYQQKPGQAPVLVIYKDSERPSGIPERFSGSSSGTTVTLTISGVQAEDEADYYCQSADSSGTY

SEQ ID NO: 26918 - protein, 96 aa, synthetic construct
EIVLTQSPATLSLSPGERATLSCGASQSVSSSYLAWYQQKPGLAPRLLIYDASSRATGIPDRFSGSGSGTDFTLTISRLEPEDFAVYYCQQYGSSP

SEQ ID NO: 26919 - protein, 101 aa, synthetic construct
DIVMTQSPDSLAVSLGERATINCKSSQSVLYSSNNKNYLAWYQQKPGQPPKLLIYWASTRESGVPDRFSGSGSGTDFTLTISSLQAEDVAVYYCQQYYSTP

SEQ ID NO: 26920 - protein, 98 aa, synthetic construct
QSVLTQPPSASGTPGQRVTISCSGSSSNIGSNTVNWYQQLPGTAPKLLIYSNNQRPSGVPDRFSGSKSGTSASLAISGLQSEDEADYYCAAWDDSLNG

SEQ ID NO: 26921 - protein, 99 aa, synthetic construct
QSALTQPASVSGSPGQSITISCTGTSSDVGGYNYVSWYQQHPGKAPKLMIYEVSNRPSGVSNRFSGSKSGNTASLTISGLQAEDEADYYCSSYTSSSTL

SEQ ID NO: 26922 - protein, 108 aa, synthetic construct
SYVLTQPPSVSAAPGQTARIVCGGDNIGSKTVHWYQQKPGQAPVLVIYYDSGRPSGIPERFSGSNSGNAATLTISRVEPGDEADYYCHVWDSSADRHVFGTGTKVTVL

SEQ ID NO: 26923 - protein, 107 aa, synthetic construct
DIQMTQSPSILSASVGDRVTLTCRASLSINRWVAWYQQKPGKAPKVLIYQASILESGVPLRFSGSGSETEFTLTISSLQPDDFATYYCQQYNMYPYTFGQGTELEIK

SEQ ID NO: 26924 - protein, 112 aa, synthetic construct
DIVMTQSPLSLPVTPGEPASISCRSSQSLRHSNGYNYLGWYVQKPGQSPQLLIYLASNRAPGVPDRFSGSGSGTDFTLKISTVEAEDVGVYYCMQPLQTPYTFGQGTKLEIK

SEQ ID NO: 26925 - protein, 107 aa, synthetic construct
DIQMTQSPSSLSASVGDRVTITCQASEDISTYLSWYQQKPGKAPNLLIYGASNLETGVPSRFSGSGSETDFTFTISSLQPEDIATYYCQQYDNLPLTFGGGTKVDIK

SEQ ID NO: 26926 - protein, 55 aa, synthetic construct
KRPSGIPDRFSGSKSGDTATLTIRGTQSEDEGDYYCQTWETTTLIFGGGTKLTVL

SEQ ID NO: 26927 - protein, 107 aa, synthetic construct
DIQMTQSPSSVSASVGDRVTVTCRASQPIAGWLAWYQQKPGKAPKLLIYTASTLQSGVPSRFSGSGSGTDYTLTISSLQPEDFATYYCQQTNSFPLTFGGGTKVEMK

SEQ ID NO: 26928 - protein, 107 aa, synthetic construct
EIVLTQSPGTLSLSPGERATLSCRASQSISSSYLAWYQQKPGQAPRLLIYSASSRDTGIPDRFSGSGSGTDFTLTITRLEPEDFAVYYCQQYGNSRTFGQGTKVEVK

SEQ ID NO: 26929 - protein, 107 aa, synthetic construct
SYELTQPPSVSVSPGQTARITCSGDALPKQYTYWYQQKPGQAPMLMISKDSERPSGIPERFSGSTSGTIVTLIISGVQAEDEADYYCQSGDSSGPWVFGGGTKLTVL

SEQ ID NO: 26930 - protein, 108 aa, synthetic construct
EIVLTQSPATLSLSPGERATLSCGANQTVDKNYLAWYRQKPGLAPSLLIYAASLRATDIPDRFTGSGSGTDFSLTISRVEPEDFAVYYCQQYGRTPLTFGGGTKVEIK

SEQ ID NO: 26931 - protein, 113 aa, synthetic construct
DIVMTQSPDSLAVSLGERATINCKSSQTLLYKFNNKEYLAWYQQKPGQPPKLLMYWASTRESGVPDRFSGSGSGTDFTLTISRLQPEDVAIYYCQQYFTTPFAFGQGTKVEIK

SEQ ID NO: 26932 - protein, 110 aa, synthetic construct
QSVLTQPPSVSGTPGQRVTISCSGSRSNIGSNTVNWYQHLPGTAPKLLLYSTYQRPSGVPDRFSGSKSGTSASLAISGLHSEDDADFYCAAWDDSLNVVVFGGGTKLTVL

SEQ ID NO: 26933 - protein, 107 aa, synthetic construct
DIRLTQSPSSVAASIGDRVTITCRASQDINNWLAWYQQQPGKAPRLLIYAASTLQSGVPSRFSGSGSGTYFTLTISSLQGSDFATYYCQQAYRFPLSFGGGTKVDIK

SEQ ID NO: 26934 - protein, 110 aa, synthetic construct
QSALTQPASVSGSPGQSITISCTGPSSDVAGYNFVSWYQQHPGKAPKLIIYEVTNRPSGVSNRFSGSKSGTTASLTISGLQAEDEAEYYCSSYFISRHVVFGGGTRVTVL

SEQ ID NO: 26935 - protein, 10 aa, synthetic construct
SAAPGQTARI

SEQ ID NO: 26936 - protein, 9 aa, synthetic construct
CHVWDSSAD

SEQ ID NO: 26937 - protein, 10 aa, synthetic construct
PVLVIYYDSG

SEQ ID NO: 26938 - protein, 10 aa, synthetic construct
YCHVWDSSAD

SEQ ID NO: 26939 - protein, 10 aa, synthetic construct
EPGDEADYYC

SEQ ID NO: 26940 - protein, 9 aa, synthetic construct
APGQTARIV

SEQ ID NO: 26941 - protein, 10 aa, synthetic construct
TLTISRVEPG

SEQ ID NO: 26942 - protein, 9 aa, synthetic construct
RHVFGTGTK

SEQ ID NO: 26943 - protein, 9 aa, synthetic construct
PSVSAAPGQ

SEQ ID NO: 26944 - protein, 10 aa, synthetic construct
GQTARIVCGG

SEQ ID NO: 26945 - protein, 10 aa, synthetic construct
DNIGSKTVHW

SEQ ID NO: 26946 - protein, 10 aa, synthetic construct
GGDNIGSKTV

SEQ ID NO: 26947 - protein, 9 aa, synthetic construct
LTISRVEPG

SEQ ID NO: 26948 - protein, 10 aa, synthetic construct
GDNIGSKTVH

SEQ ID NO: 26949 - protein, 10 aa, synthetic construct
DSSADRHVFG

SEQ ID NO: 26950 - protein, 9 aa, synthetic construct
ISRVEPGDE

SEQ ID NO: 26951 - protein, 9 aa, synthetic construct
YCHVWDSSA

SEQ ID NO: 26952 - protein, 9 aa, synthetic construct
TVHWYQQKP

SEQ ID NO: 26953 - protein, 9 aa, synthetic construct
GQTARIVCG

SEQ ID NO: 26954 - protein, 10 aa, synthetic construct
IVCGGDNIGS

SEQ ID NO: 26955 - protein, 9 aa, synthetic construct
ADYYCHVWD

SEQ ID NO: 26956 - protein, 10 aa, synthetic construct
RHVFGTGTKV

SEQ ID NO: 26957 - protein, 9 aa, synthetic construct
PPSVSAAPG

SEQ ID NO: 26958 - protein, 10 aa, synthetic construct
VWDSSADRHV

SEQ ID NO: 26959 - protein, 9 aa, synthetic construct
RVEPGDEAD

SEQ ID NO: 26960 - protein, 9 aa, synthetic construct
QPPSVSAAP

SEQ ID NO: 26961 - protein, 10 aa, synthetic construct
PGDEADYYCH

SEQ ID NO: 26962 - protein, 10 aa, synthetic construct
SNSGNAATLT

SEQ ID NO: 26963 - protein, 10 aa, synthetic construct
GNAATLTISR

SEQ ID NO: 26964 - protein, 9 aa, synthetic construct
SGNAATLTI

SEQ ID NO: 26965 - protein, 10 aa, synthetic construct
NIGSKTVHWY

SEQ ID NO: 26966 - protein, 10 aa, synthetic construct
SSADRHVFGT

SEQ ID NO: 26967 - protein, 10 aa, synthetic construct
VEPGDEADYY

SEQ ID NO: 26968 - protein, 9 aa, synthetic construct
QTARIVCGG

SEQ ID NO: 26969 - protein, 9 aa, synthetic construct
DSGRPSGIP

SEQ ID NO: 26970 - protein, 10 aa, synthetic construct
RIVCGGDNIG

SEQ ID NO: 26971 - protein, 10 aa, synthetic construct
CHVWDSSADR

SEQ ID NO: 26972 - protein, 10 aa, synthetic construct
TARIVCGGDN

SEQ ID NO: 26973 - protein, 9 aa, synthetic construct
YYDSGRPSG

SEQ ID NO: 26974 - protein, 9 aa, synthetic construct
FGTGTKVTV

SEQ ID NO: 26975 - protein, 10 aa, synthetic construct
GDEADYYCHV

SEQ ID NO: 26976 - protein, 9 aa, synthetic construct
SNSGNAATL

SEQ ID NO: 26977 - protein, 9 aa, synthetic construct
NAATLTISR

SEQ ID NO: 26978 - protein, 10 aa, synthetic construct
GRPSGIPERF

SEQ ID NO: 26979 - protein, 9 aa, synthetic construct
WDSSADRHV

SEQ ID NO: 26980 - protein, 9 aa, synthetic construct
DYYCHVWDS

SEQ ID NO: 26981 - protein, 9 aa, synthetic construct
ADRHVFGTG

SEQ ID NO: 26982 - protein, 9 aa, synthetic construct
HVWDSSADR

SEQ ID NO: 26983 - protein, 10 aa, synthetic construct
VSAAPGQTAR

SEQ ID NO: 26984 - protein, 9 aa, synthetic construct
GGDNIGSKT

SEQ ID NO: 26985 - protein, 9 aa, synthetic construct
SADRHVFGT

SEQ ID NO: 26986 - protein, 9 aa, synthetic construct
YYCHVWDSS

SEQ ID NO: 26987 - protein, 9 aa, synthetic construct
LTQPPSVSA

SEQ ID NO: 26988 - protein, 10 aa, synthetic construct
IYYDSGRPSG

SEQ ID NO: 26989 - protein, 9 aa, synthetic construct
TQPPSVSAA

SEQ ID NO: 26990 - protein, 10 aa, synthetic construct
DYYCHVWDSS

SEQ ID NO: 26991 - protein, 10 aa, synthetic construct
TQPPSVSAAP

SEQ ID NO: 26992 - protein, 10 aa, synthetic construct
VIYYDSGRPS

SEQ ID NO: 26993 - protein, 10 aa, synthetic construct
ADYYCHVWDS

SEQ ID NO: 26994 - protein, 10 aa, synthetic construct
PGQTARIVCG

SEQ ID NO: 26995 - protein, 9 aa, synthetic construct
GRPSGIPER

SEQ ID NO: 26996 - protein, 10 aa, synthetic construct
SRVEPGDEAD

SEQ ID NO: 26997 - protein, 10 aa, synthetic construct
GSKTVHWYQQ

SEQ ID NO: 26998 - protein, 10 aa, synthetic construct
FGTGTKVTVL

SEQ ID NO: 26999 - protein, 10 aa, synthetic construct
ISRVEPGDEA

SEQ ID NO: 27000 - protein, 10 aa, synthetic construct
YYCHVWDSSA

SEQ ID NO: 27001 - protein, 10 aa, synthetic construct
IGSKTVHWYQ

SEQ ID NO: 27002 - protein, 10 aa, synthetic construct
DSGRPSGIPE

SEQ ID NO: 27003 - protein, 9 aa, synthetic construct
KTVHWYQQK

SEQ ID NO: 27004 - protein, 10 aa, synthetic construct
TISRVEPGDE

SEQ ID NO: 27005 - protein, 9 aa, synthetic construct
HVFGTGTKV

SEQ ID NO: 27006 - protein, 9 aa, synthetic construct
AATLTISRV

SEQ ID NO: 27007 - protein, 10 aa, synthetic construct
CGGDNIGSKT

SEQ ID NO: 27008 - protein, 10 aa, synthetic construct
VLVIYYDSGR

SEQ ID NO: 27009 - protein, 9 aa, synthetic construct
EPGDEADYY

SEQ ID NO: 27010 - protein, 9 aa, synthetic construct
VFGTGTKVT

SEQ ID NO: 27011 - protein, 9 aa, synthetic construct
DRHVFGTGT

SEQ ID NO: 27012 - protein, 9 aa, synthetic construct
SSADRHVFG

SEQ ID NO: 27013 - protein, 10 aa, synthetic construct
RVEPGDEADY

SEQ ID NO: 27014 - protein, 9 aa, synthetic construct
SAAPGQTAR

SEQ ID NO: 27015 - protein, 10 aa, synthetic construct
GSNSGNAATL

SEQ ID NO: 27016 - protein, 10 aa, synthetic construct
SKTVHWYQQK

SEQ ID NO: 27017 - protein, 10 aa, synthetic construct
SGNAATLTIS

SEQ ID NO: 27018 - protein, 9 aa, synthetic construct
SVSAAPGQT

SEQ ID NO: 27019 - protein, 10 aa, synthetic construct
NSGNAATLTI

SEQ ID NO: 27020 - protein, 9 aa, synthetic construct
GSNSGNAAT

SEQ ID NO: 27021 - protein, 9 aa, synthetic construct
CGGDNIGSK

SEQ ID NO: 27022 - protein, 9 aa, synthetic construct
NSGNAATLT

SEQ ID NO: 27023 - protein, 9 aa, synthetic construct
GSKTVHWYQ

SEQ ID NO: 27024 - protein, 9 aa, synthetic construct
LVIYYDSGR

SEQ ID NO: 27025 - protein, 10 aa, synthetic construct
FSGSNSGNAA

SEQ ID NO: 27026 - protein, 10 aa, synthetic construct
SGSNSGNAAT

SEQ ID NO: 27027 - protein, 10 aa, synthetic construct
VFGTGTKVTV

SEQ ID NO: 27028 - protein, 9 aa, synthetic construct
SKTVHWYQQ

SEQ ID NO: 27029 - protein, 9 aa, synthetic construct
PGQTARIVC

SEQ ID NO: 27030 - protein, 10 aa, synthetic construct
APGQTARIVC

SEQ ID NO: 27031 - protein, 9 aa, synthetic construct
VWDSSADRH

SEQ ID NO: 27032 - protein, 9 aa, synthetic construct
IYYDSGRPS

SEQ ID NO: 27033 - protein, 9 aa, synthetic construct
SGRPSGIPE

SEQ ID NO: 27034 - protein, 10 aa, synthetic construct
LVIYYDSGRP

SEQ ID NO: 27035 - protein, 9 aa, synthetic construct
SGSNSGNAA

SEQ ID NO: 27036 - protein, 10 aa, synthetic construct
VLTQPPSVSA

SEQ ID NO: 27037 - protein, 9 aa, synthetic construct
ARIVCGGDN

SEQ ID NO: 27038 - protein, 9 aa, synthetic construct
PGDEADYYC

SEQ ID NO: 27039 - protein, 9 aa, synthetic construct
IGSKTVHWY

SEQ ID NO: 27040 - protein, 9 aa, synthetic construct
GDNIGSKTV

SEQ ID NO: 27041 - protein, 10 aa, synthetic construct
KTVHWYQQKP

SEQ ID NO: 27042 - protein, 10 aa, synthetic construct
ADRHVFGTGT

SEQ ID NO: 27043 - protein, 10 aa, synthetic construct
RFSGSNSGNA

SEQ ID NO: 27044 - protein, 9 aa, synthetic construct
VLVIYYDSG

SEQ ID NO: 27045 - protein, 10 aa, synthetic construct
LTISRVEPGD

SEQ ID NO: 27046 - protein, 9 aa, synthetic construct
VIYYDSGRP

SEQ ID NO: 27047 - protein, 10 aa, synthetic construct
EADYYCHVWD

SEQ ID NO: 27048 - protein, 10 aa, synthetic construct
LTQPPSVSAA

SEQ ID NO: 27049 - protein, 9 aa, synthetic construct
DSSADRHVF

SEQ ID NO: 27050 - protein, 10 aa, synthetic construct
DRHVFGTGTK

SEQ ID NO: 27051 - protein, 9 aa, synthetic construct
GNAATLTIS

SEQ ID NO: 27052 - protein, 10 aa, synthetic construct
QTARIVCGGD

SEQ ID NO: 27053 - protein, 10 aa, synthetic construct
SADRHVFGTG

SEQ ID NO: 27054 - protein, 10 aa, synthetic construct
VCGGDNIGSK

SEQ ID NO: 27055 - protein, 10 aa, synthetic construct
HVFGTGTKVT

SEQ ID NO: 27056 - protein, 9 aa, synthetic construct
FSGSNSGNA

SEQ ID NO: 27057 - protein, 9 aa, synthetic construct
VEPGDEADY

SEQ ID NO: 27058 - protein, 9 aa, synthetic construct
VSAAPGQTA

SEQ ID NO: 27059 - protein, 9 aa, synthetic construct
TLTISRVEP

SEQ ID NO: 27060 - protein, 9 aa, synthetic construct
RIVCGGDNI

SEQ ID NO: 27061 - protein, 9 aa, synthetic construct
TISRVEPGD

SEQ ID NO: 27062 - protein, 10 aa, synthetic construct
SGRPSGIPER

SEQ ID NO: 27063 - protein, 10 aa, synthetic construct
WDSSADRHVF

SEQ ID NO: 27064 - protein, 9 aa, synthetic construct
AAPGQTARI

SEQ ID NO: 27065 - protein, 10 aa, synthetic construct
YYDSGRPSGI

SEQ ID NO: 27066 - protein, 10 aa, synthetic construct
AATLTISRVE

SEQ ID NO: 27067 - protein, 9 aa, synthetic construct
TARIVCGGD

SEQ ID NO: 27068 - protein, 9 aa, synthetic construct
SRVEPGDEA

SEQ ID NO: 27069 - protein, 9 aa, synthetic construct
IVCGGDNIG

SEQ ID NO: 27070 - protein, 10 aa, synthetic construct
PSVSAAPGQT

SEQ ID NO: 27071 - protein, 10 aa, synthetic construct
DEADYYCHVW

SEQ ID NO: 27072 - protein, 9 aa, synthetic construct
VCGGDNIGS

SEQ ID NO: 27073 - protein, 10 aa, synthetic construct
ARIVCGGDNI

SEQ ID NO: 27074 - protein, 9 aa, synthetic construct
YDSGRPSGI

SEQ ID NO: 27075 - protein, 10 aa, synthetic construct
PPSVSAAPGQ

SEQ ID NO: 27076 - protein, 10 aa, synthetic construct
NAATLTISRV

SEQ ID NO: 27077 - protein, 10 aa, synthetic construct
YDSGRPSGIP

SEQ ID NO: 27078 - protein, 10 aa, synthetic construct
AAPGQTARIV

SEQ ID NO: 27079 - protein, 9 aa, synthetic construct
EADYYCHVW

SEQ ID NO: 27080 - protein, 10 aa, synthetic construct
ATLTISRVEP

SEQ ID NO: 27081 - protein, 9 aa, synthetic construct
GDEADYYCH

SEQ ID NO: 27082 - protein, 9 aa, synthetic construct
DNIGSKTVH

SEQ ID NO: 27083 - protein, 10 aa, synthetic construct
TVHWYQQKPG

SEQ ID NO: 27084 - protein, 9 aa, synthetic construct
NIGSKTVHW

SEQ ID NO: 27085 - protein, 10 aa, synthetic construct
HVWDSSADRH

SEQ ID NO: 27086 - protein, 10 aa, synthetic construct
SVSAAPGQTA

SEQ ID NO: 27087 - protein, 10 aa, synthetic construct
QPPSVSAAPG

SEQ ID NO: 27088 - protein, 9 aa, synthetic construct
DEADYYCHV

SEQ ID NO: 27089 - protein, 10 aa, synthetic construct
SILESGVPLR

SEQ ID NO: 27090 - protein, 10 aa, synthetic construct
ILSASVGDRV

SEQ ID NO: 27091 - protein, 10 aa, synthetic construct
LESGVPLRFS

SEQ ID NO: 27092 - protein, 9 aa, synthetic construct
PKVLIYQAS

SEQ ID NO: 27093 - protein, 10 aa, synthetic construct
VAWYQQKPGK

SEQ ID NO: 27094 - protein, 9 aa, synthetic construct
SGSGSETEF

SEQ ID NO: 27095 - protein, 9 aa, synthetic construct
LRFSGSGSE

SEQ ID NO: 27096 - protein, 10 aa, synthetic construct
RVTLTCRASL

SEQ ID NO: 27097 - protein, 10 aa, synthetic construct
YCQQYNMYPY

SEQ ID NO: 27098 - protein, 9 aa, synthetic construct
TLTCRASLS

SEQ ID NO: 27099 - protein, 10 aa, synthetic construct
IYQASILESG

SEQ ID NO: 27100 - protein, 10 aa, synthetic construct
QQKPGKAPKV

SEQ ID NO: 27101 - protein, 10 aa, synthetic construct
MYPYTFGQGT

SEQ ID NO: 27102 - protein, 10 aa, synthetic construct
SETEFTLTIS

SEQ ID NO: 27103 - protein, 9 aa, synthetic construct
SILSASVGD

SEQ ID NO: 27104 - protein, 10 aa, synthetic construct
TCRASLSINR

SEQ ID NO: 27105 - protein, 10 aa, synthetic construct
YTFGQGTELE

SEQ ID NO: 27106 - protein, 10 aa, synthetic construct
FSGSGSETEF

SEQ ID NO: 27107 - protein, 9 aa, synthetic construct
SPSILSASV

SEQ ID NO: 27108 - protein, 9 aa, synthetic construct
QSPSILSAS

SEQ ID NO: 27109 - protein, 10 aa, synthetic construct
PYTFGQGTEL

SEQ ID NO: 27110 - protein, 9 aa, synthetic construct
GSGSETEFT

SEQ ID NO: 27111 - protein, 10 aa, synthetic construct
TLTCRASLSI

SEQ ID NO: 27112 - protein, 10 aa, synthetic construct
ASLSINRWVA

SEQ ID NO: 27113 - protein, 10 aa, synthetic construct
SGSETEFTLT

SEQ ID NO: 27114 - protein, 10 aa, synthetic construct
KPGKAPKVLI

SEQ ID NO: 27115 - protein, 9 aa, synthetic construct
CQQYNMYPY

SEQ ID NO: 27116 - protein, 9 aa, synthetic construct
MTQSPSILS

SEQ ID NO: 27117 - protein, 9 aa, synthetic construct
TCRASLSIN

SEQ ID NO: 27118 - protein, 9 aa, synthetic construct
IQMTQSPSI

SEQ ID NO: 27119 - protein, 9 aa, synthetic construct
VGDRVTLTC

SEQ ID NO: 27120 - protein, 9 aa, synthetic construct
QQYNMYPYT

SEQ ID NO: 27121 - protein, 10 aa, synthetic construct
MTQSPSILSA

SEQ ID NO: 27122 - protein, 10 aa, synthetic construct
QQYNMYPYTF

SEQ ID NO: 27123 - protein, 10 aa, synthetic construct
FGQGTELEIK

SEQ ID NO: 27124 - protein, 10 aa, synthetic construct
VGDRVTLTCR

SEQ ID NO: 27125 - protein, 10 aa, synthetic construct
PSILSASVGD

SEQ ID NO: 27126 - protein, 10 aa, synthetic construct
INRWVAWYQQ

SEQ ID NO: 27127 - protein, 9 aa, synthetic construct
QMTQSPSIL

SEQ ID NO: 27128 - protein, 9 aa, synthetic construct
QKPGKAPKV

SEQ ID NO: 27129 - protein, 10 aa, synthetic construct
QKPGKAPKVL

SEQ ID NO: 27130 - protein, 9 aa, synthetic construct
VLIYQASIL

SEQ ID NO: 27131 - protein, 9 aa, synthetic construct
GVPLRFSGS

SEQ ID NO: 27132 - protein, 9 aa, synthetic construct
RVTLTCRAS

SEQ ID NO: 27133 - protein, 10 aa, synthetic construct
KAPKVLIYQA

SEQ ID NO: 27134 - protein, 10 aa, synthetic construct
IQMTQSPSIL

SEQ ID NO: 27135 - protein, 9 aa, synthetic construct
DRVTLTCRA

SEQ ID NO: 27136 - protein, 9 aa, synthetic construct
NRWVAWYQQ

SEQ ID NO: 27137 - protein, 10 aa, synthetic construct
DRVTLTCRAS

SEQ ID NO: 27138 - protein, 9 aa, synthetic construct
ASVGDRVTL

SEQ ID NO: 27139 - protein, 9 aa, synthetic construct
ETEFTLTIS

SEQ ID NO: 27140 - protein, 10 aa, synthetic construct
YQASILESGV

SEQ ID NO: 27141 - protein, 9 aa, synthetic construct
ILSASVGDR

SEQ ID NO: 27142 - protein, 9 aa, synthetic construct
CRASLSINR

SEQ ID NO: 27143 - protein, 9 aa, synthetic construct
RFSGSGSET

SEQ ID NO: 27144 - protein, 9 aa, synthetic construct
YQASILESG

SEQ ID NO: 27145 - protein, 10 aa, synthetic construct
LRFSGSGSET

SEQ ID NO: 27146 - protein, 10 aa, synthetic construct
LIYQASILES

SEQ ID NO: 27147 - protein, 9 aa, synthetic construct
YPYTFGQGT

SEQ ID NO: 27148 - protein, 9 aa, synthetic construct
WVAWYQQKP

SEQ ID NO: 27149 - protein, 9 aa, synthetic construct
ESGVPLRFS

SEQ ID NO: 27150 - protein, 9 aa, synthetic construct
SVGDRVTLT

SEQ ID NO: 27151 - protein, 10 aa, synthetic construct
SASVGDRVTL

SEQ ID NO: 27152 - protein, 10 aa, synthetic construct
SVGDRVTLTC

SEQ ID NO: 27153 - protein, 10 aa, synthetic construct
RWVAWYQQKP

SEQ ID NO: 27154 - protein, 9 aa, synthetic construct
PSILSASVG

SEQ ID NO: 27155 - protein, 10 aa, synthetic construct
DIQMTQSPSI

SEQ ID NO: 27156 - protein, 10 aa, synthetic construct
PGKAPKVLIY

SEQ ID NO: 27157 - protein, 10 aa, synthetic construct
ESGVPLRFSG

SEQ ID NO: 27158 - protein, 9 aa, synthetic construct
YTFGQGTEL

SEQ ID NO: 27159 - protein, 10 aa, synthetic construct
NRWVAWYQQK

SEQ ID NO: 27160 - protein, 9 aa, synthetic construct
PGKAPKVLI

SEQ ID NO: 27161 - protein, 9 aa, synthetic construct
FSGSGSETE

SEQ ID NO: 27162 - protein, 10 aa, synthetic construct
RFSGSGSETE

SEQ ID NO: 27163 - protein, 10 aa, synthetic construct
GSETEFTLTI

SEQ ID NO: 27164 - protein, 10 aa, synthetic construct
ETEFTLTISS

SEQ ID NO: 27165 - protein, 9 aa, synthetic construct
KAPKVLIYQ

SEQ ID NO: 27166 - protein, 9 aa, synthetic construct
VTLTCRASL

SEQ ID NO: 27167 - protein, 10 aa, synthetic construct
PKVLIYQASI

SEQ ID NO: 27168 - protein, 9 aa, synthetic construct
SINRWVAWY

SEQ ID NO: 27169 - protein, 10 aa, synthetic construct
ASVGDRVTLT

SEQ ID NO: 27170 - protein, 10 aa, synthetic construct
QYNMYPYTFG

SEQ ID NO: 27171 - protein, 10 aa, synthetic construct
QMTQSPSILS

SEQ ID NO: 27172 - protein, 10 aa, synthetic construct
WVAWYQQKPG

SEQ ID NO: 27173 - protein, 10 aa, synthetic construct
TQSPSILSAS

SEQ ID NO: 27174 - protein, 10 aa, synthetic construct
VPLRFSGSGS

SEQ ID NO: 27175 - protein, 9 aa, synthetic construct
NMYPYTFGQ

SEQ ID NO: 27176 - protein, 9 aa, synthetic construct
APKVLIYQA

SEQ ID NO: 27177 - protein, 9 aa, synthetic construct
INRWVAWYQ

SEQ ID NO: 27178 - protein, 9 aa, synthetic construct
SLSINRWVA

SEQ ID NO: 27179 - protein, 10 aa, synthetic construct
GKAPKVLIYQ

SEQ ID NO: 27180 - protein, 9 aa, synthetic construct
YYCQQYNMY

SEQ ID NO: 27181 - protein, 9 aa, synthetic construct
VPLRFSGSG

SEQ ID NO: 27182 - protein, 9 aa, synthetic construct
TQSPSILSA

SEQ ID NO: 27183 - protein, 9 aa, synthetic construct
PYTFGQGTE

SEQ ID NO: 27184 - protein, 10 aa, synthetic construct
CRASLSINRW

SEQ ID NO: 27185 - protein, 10 aa, synthetic construct
CQQYNMYPYT

SEQ ID NO: 27186 - protein, 10 aa, synthetic construct
QSPSILSASV

SEQ ID NO: 27187 - protein, 10 aa, synthetic construct
TFGQGTELEI

SEQ ID NO: 27188 - protein, 10 aa, synthetic construct
QASILESGVP

SEQ ID NO: 27189 - protein, 10 aa, synthetic construct
SLSINRWVAW

SEQ ID NO: 27190 - protein, 10 aa, synthetic construct
YYCQQYNMYP

SEQ ID NO: 27191 - protein, 10 aa, synthetic construct
ASILESGVPL

SEQ ID NO: 27192 - protein, 10 aa, synthetic construct
ATYYCQQYNM

SEQ ID NO: 27193 - protein, 9 aa, synthetic construct
SGSETEFTL

SEQ ID NO: 27194 - protein, 10 aa, synthetic construct
VLIYQASILE

SEQ ID NO: 27195 - protein, 10 aa, synthetic construct
VTLTCRASLS

SEQ ID NO: 27196 - protein, 10 aa, synthetic construct
APKVLIYQAS

SEQ ID NO: 27197 - protein, 10 aa, synthetic construct
SGSGSETEFT

SEQ ID NO: 27198 - protein, 9 aa, synthetic construct
ASLSINRWV

SEQ ID NO: 27199 - protein, 9 aa, synthetic construct
QASILESGV

SEQ ID NO: 27200 - protein, 9 aa, synthetic construct
GSETEFTLT

SEQ ID NO: 27201 - protein, 9 aa, synthetic construct
LSINRWVAW

SEQ ID NO: 27202 - protein, 9 aa, synthetic construct
LTCRASLSI

SEQ ID NO: 27203 - protein, 10 aa, synthetic construct
LTCRASLSIN

SEQ ID NO: 27204 - protein, 10 aa, synthetic construct
RASLSINRWV

SEQ ID NO: 27205 - protein, 10 aa, synthetic construct
YPYTFGQGTE

SEQ ID NO: 27206 - protein, 10 aa, synthetic construct
TYYCQQYNMY

SEQ ID NO: 27207 - protein, 9 aa, synthetic construct
LIYQASILE

SEQ ID NO: 27208 - protein, 10 aa, synthetic construct
LSINRWVAWY

SEQ ID NO: 27209 - protein, 10 aa, synthetic construct
SGVPLRFSGS

SEQ ID NO: 27210 - protein, 9 aa, synthetic construct
YCQQYNMYP

SEQ ID NO: 27211 - protein, 9 aa, synthetic construct
TYYCQQYNM

SEQ ID NO: 27212 - protein, 9 aa, synthetic construct
VAWYQQKPG

SEQ ID NO: 27213 - protein, 10 aa, synthetic construct
GVPLRFSGSG

SEQ ID NO: 27214 - protein, 9 aa, synthetic construct
GKAPKVLIY

SEQ ID NO: 27215 - protein, 9 aa, synthetic construct
QYNMYPYTF

SEQ ID NO: 27216 - protein, 10 aa, synthetic construct
ILESGVPLRF

SEQ ID NO: 27217 - protein, 9 aa, synthetic construct
GDRVTLTCR

SEQ ID NO: 27218 - protein, 9 aa, synthetic construct
SGVPLRFSG

SEQ ID NO: 27219 - protein, 9 aa, synthetic construct
FGQGTELEI

SEQ ID NO: 27220 - protein, 9 aa, synthetic construct
SETEFTLTI

SEQ ID NO: 27221 - protein, 9 aa, synthetic construct
PLRFSGSGS

SEQ ID NO: 27222 - protein, 10 aa, synthetic construct
GDRVTLTCRA

SEQ ID NO: 27223 - protein, 10 aa, synthetic construct
SPSILSASVG

SEQ ID NO: 27224 - protein, 9 aa, synthetic construct
ILESGVPLR

SEQ ID NO: 27225 - protein, 10 aa, synthetic construct
SINRWVAWYQ

SEQ ID NO: 27226 - protein, 10 aa, synthetic construct
KVLIYQASIL

SEQ ID NO: 27227 - protein, 9 aa, synthetic construct
IYQASILES

SEQ ID NO: 27228 - protein, 9 aa, synthetic construct
ASILESGVP

SEQ ID NO: 27229 - protein, 9 aa, synthetic construct
KPGKAPKVL

SEQ ID NO: 27230 - protein, 9 aa, synthetic construct
RASLSINRW

SEQ ID NO: 27231 - protein, 9 aa, synthetic construct
TFGQGTELE

SEQ ID NO: 27232 - protein, 9 aa, synthetic construct
YNMYPYTFG

SEQ ID NO: 27233 - protein, 10 aa, synthetic construct
GSGSETEFTL

SEQ ID NO: 27234 - protein, 10 aa, synthetic construct
NMYPYTFGQG

SEQ ID NO: 27235 - protein, 9 aa, synthetic construct
LESGVPLRF

SEQ ID NO: 27236 - protein, 9 aa, synthetic construct
KVLIYQASI

SEQ ID NO: 27237 - protein, 10 aa, synthetic construct
PLRFSGSGSE

SEQ ID NO: 27238 - protein, 10 aa, synthetic construct
SILSASVGDR

SEQ ID NO: 27239 - protein, 10 aa, synthetic construct
YNMYPYTFGQ

SEQ ID NO: 27240 - protein, 9 aa, synthetic construct
RWVAWYQQK

SEQ ID NO: 27241 - protein, 9 aa, synthetic construct
MYPYTFGQG

SEQ ID NO: 27242 - protein, 9 aa, synthetic construct
SILESGVPL

SEQ ID NO: 27243 - protein, 10 aa, synthetic construct
PQLLIYLASN

SEQ ID NO: 27244 - protein, 9 aa, synthetic construct
YVQKPGQSP

SEQ ID NO: 27245 - protein, 9 aa, synthetic construct
CMQPLQTPY

SEQ ID NO: 27246 - protein, 10 aa, synthetic construct
YLASNRAPGV

SEQ ID NO: 27247 - protein, 9 aa, synthetic construct
ISTVEAEDV

SEQ ID NO: 27248 - protein, 9 aa, synthetic construct
PLQTPYTFG

SEQ ID NO: 27249 - protein, 9 aa, synthetic construct
LRHSNGYNY

SEQ ID NO: 27250 - protein, 10 aa, synthetic construct
LQTPYTFGQG

SEQ ID NO: 27251 - protein, 10 aa, synthetic construct
NRAPGVPDRF

SEQ ID NO: 27252 - protein, 10 aa, synthetic construct
LGWYVQKPGQ

SEQ ID NO: 27253 - protein, 9 aa, synthetic construct
LASNRAPGV

SEQ ID NO: 27254 - protein, 9 aa, synthetic construct
SPQLLIYLA

SEQ ID NO: 27255 - protein, 10 aa, synthetic construct
YVQKPGQSPQ

SEQ ID NO: 27256 - protein, 10 aa, synthetic construct
SSQSLRHSNG

SEQ ID NO: 27257 - protein, 9 aa, synthetic construct
CRSSQSLRH

SEQ ID NO: 27258 - protein, 10 aa, synthetic construct
LLIYLASNRA

SEQ ID NO: 27259 - protein, 10 aa, synthetic construct
LIYLASNRAP

SEQ ID NO: 27260 - protein, 9 aa, synthetic construct
GVYYCMQPL

SEQ ID NO: 27261 - protein, 10 aa, synthetic construct
WYVQKPGQSP

SEQ ID NO: 27262 - protein, 9 aa, synthetic construct
SSQSLRHSN

SEQ ID NO: 27263 - protein, 10 aa, synthetic construct
YNYLGWYVQK

SEQ ID NO: 27264 - protein, 9 aa, synthetic construct
LQTPYTFGQ

SEQ ID NO: 27265 - protein, 9 aa, synthetic construct
SNRAPGVPD

SEQ ID NO: 27266 - protein, 10 aa, synthetic construct
LASNRAPGVP

SEQ ID NO: 27267 - protein, 9 aa, synthetic construct
VYYCMQPLQ

SEQ ID NO: 27268 - protein, 9 aa, synthetic construct
GWYVQKPGQ

SEQ ID NO: 27269 - protein, 9 aa, synthetic construct
QSLRHSNGY

SEQ ID NO: 27270 - protein, 10 aa, synthetic construct
KISTVEAEDV

SEQ ID NO: 27271 - protein, 9 aa, synthetic construct
FTLKISTVE

SEQ ID NO: 27272 - protein, 9 aa, synthetic construct
YLGWYVQKP

SEQ ID NO: 27273 - protein, 10 aa, synthetic construct
DFTLKISTVE

SEQ ID NO: 27274 - protein, 10 aa, synthetic construct
YCMQPLQTPY

SEQ ID NO: 27275 - protein, 10 aa, synthetic construct
ISCRSSQSLR

SEQ ID NO: 27276 - protein, 10 aa, synthetic construct
LKISTVEAED

SEQ ID NO: 27277 - protein, 9 aa, synthetic construct
IYLASNRAP

SEQ ID NO: 27278 - protein, 9 aa, synthetic construct
PYTFGQGTK

SEQ ID NO: 27279 - protein, 9 aa, synthetic construct
RSSQSLRHS

SEQ ID NO: 27280 - protein, 10 aa, synthetic construct
STVEAEDVGV

SEQ ID NO: 27281 - protein, 9 aa, synthetic construct
WYVQKPGQS

SEQ ID NO: 27282 - protein, 9 aa, synthetic construct
VQKPGQSPQ

SEQ ID NO: 27283 - protein, 10 aa, synthetic construct
YLGWYVQKPG

SEQ ID NO: 27284 - protein, 10 aa, synthetic construct
APGVPDRFSG

SEQ ID NO: 27285 - protein, 10 aa, synthetic construct
VGVYYCMQPL

SEQ ID NO: 27286 - protein, 10 aa, synthetic construct
RHSNGYNYLG

SEQ ID NO: 27287 - protein, 10 aa, synthetic construct
DVGVYYCMQP

SEQ ID NO: 27288 - protein, 10 aa, synthetic construct
QSLRHSNGYN

SEQ ID NO: 27289 - protein, 9 aa, synthetic construct
NGYNYLGWY

SEQ ID NO: 27290 - protein, 10 aa, synthetic construct
TDFTLKISTV

SEQ ID NO: 27291 - protein, 9 aa, synthetic construct
APGVPDRFS

SEQ ID NO: 27292 - protein, 10 aa, synthetic construct
MQPLQTPYTF

SEQ ID NO: 27293 - protein, 9 aa, synthetic construct
PQLLIYLAS

SEQ ID NO: 27294 - protein, 9 aa, synthetic construct
LLIYLASNR

SEQ ID NO: 27295 - protein, 10 aa, synthetic construct
PYTFGQGTKL

SEQ ID NO: 27296 - protein, 10 aa, synthetic construct
NGYNYLGWYV

SEQ ID NO: 27297 - protein, 9 aa, synthetic construct
LIYLASNRA

SEQ ID NO: 27298 - protein, 9 aa, synthetic construct
YCMQPLQTP

SEQ ID NO: 27299 - protein, 10 aa, synthetic construct
VQKPGQSPQL

SEQ ID NO: 27300 - protein, 9 aa, synthetic construct
NYLGWYVQK

SEQ ID NO: 27301 - protein, 10 aa, synthetic construct
RAPGVPDRFS

SEQ ID NO: 27302 - protein, 9 aa, synthetic construct
YLASNRAPG

SEQ ID NO: 27303 - protein, 10 aa, synthetic construct
TVEAEDVGVY

SEQ ID NO: 27304 - protein, 10 aa, synthetic construct
ASNRAPGVPD

SEQ ID NO: 27305 - protein, 9 aa, synthetic construct
SQSLRHSNG

SEQ ID NO: 27306 - protein, 10 aa, synthetic construct
LRHSNGYNYL

SEQ ID NO: 27307 - protein, 10 aa, synthetic construct
GVYYCMQPLQ

SEQ ID NO: 27308 - protein, 9 aa, synthetic construct
NRAPGVPDR

SEQ ID NO: 27309 - protein, 10 aa, synthetic construct
VYYCMQPLQT

SEQ ID NO: 27310 - protein, 9 aa, synthetic construct
RHSNGYNYL

SEQ ID NO: 27311 - protein, 10 aa, synthetic construct
NYLGWYVQKP

SEQ ID NO: 27312 - protein, 9 aa, synthetic construct
LKISTVEAE

SEQ ID NO: 27313 - protein, 9 aa, synthetic construct
QTPYTFGQG

SEQ ID NO: 27314 - protein, 9 aa, synthetic construct
HSNGYNYLG

SEQ ID NO: 27315 - protein, 9 aa, synthetic construct
YNYLGWYVQ

SEQ ID NO: 27316 - protein, 9 aa, synthetic construct
RAPGVPDRF

SEQ ID NO: 27317 - protein, 10 aa, synthetic construct
QSPQLLIYLA

SEQ ID NO: 27318 - protein, 10 aa, synthetic construct
GYNYLGWYVQ

SEQ ID NO: 27319 - protein, 9 aa, synthetic construct
LGWYVQKPG

SEQ ID NO: 27320 - protein, 10 aa, synthetic construct
YYCMQPLQTP

SEQ ID NO: 27321 - protein, 10 aa, synthetic construct
CMQPLQTPYT

SEQ ID NO: 27322 - protein, 9 aa, synthetic construct
QPLQTPYTF

SEQ ID NO: 27323 - protein, 9 aa, synthetic construct
TLKISTVEA

SEQ ID NO: 27324 - protein, 10 aa, synthetic construct
YTFGQGTKLE

SEQ ID NO: 27325 - protein, 10 aa, synthetic construct
TLKISTVEAE

SEQ ID NO: 27326 - protein, 10 aa, synthetic construct
QLLIYLASNR

SEQ ID NO: 27327 - protein, 10 aa, synthetic construct
GTDFTLKIST

SEQ ID NO: 27328 - protein, 9 aa, synthetic construct
SNGYNYLGW

SEQ ID NO: 27329 - protein, 9 aa, synthetic construct
YTFGQGTKL

SEQ ID NO: 27330 - protein, 10 aa, synthetic construct
QTPYTFGQGT

SEQ ID NO: 27331 - protein, 10 aa, synthetic construct
RSSQSLRHSN

SEQ ID NO: 27332 - protein, 10 aa, synthetic construct
PGVPDRFSGS

SEQ ID NO: 27333 - protein, 10 aa, synthetic construct
FGQGTKLEIK

SEQ ID NO: 27334 - protein, 9 aa, synthetic construct
KISTVEAED

SEQ ID NO: 27335 - protein, 10 aa, synthetic construct
SNGYNYLGWY

SEQ ID NO: 27336 - protein, 10 aa, synthetic construct
SPQLLIYLAS

SEQ ID NO: 27337 - protein, 9 aa, synthetic construct
TVEAEDVGV

SEQ ID NO: 27338 - protein, 9 aa, synthetic construct
SLRHSNGYN

SEQ ID NO: 27339 - protein, 9 aa, synthetic construct
YYCMQPLQT

SEQ ID NO: 27340 - protein, 10 aa, synthetic construct
ISTVEAEDVG

SEQ ID NO: 27341 - protein, 9 aa, synthetic construct
VGVYYCMQP

SEQ ID NO: 27342 - protein, 9 aa, synthetic construct
GYNYLGWYV

SEQ ID NO: 27343 - protein, 10 aa, synthetic construct
TPYTFGQGTK

SEQ ID NO: 27344 - protein, 9 aa, synthetic construct
TPYTFGQGT

SEQ ID NO: 27345 - protein, 10 aa, synthetic construct
SCRSSQSLRH

SEQ ID NO: 27346 - protein, 10 aa, synthetic construct
PLQTPYTFGQ

SEQ ID NO: 27347 - protein, 9 aa, synthetic construct
FGQGTKLEI

SEQ ID NO: 27348 - protein, 9 aa, synthetic construct
PGVPDRFSG

SEQ ID NO: 27349 - protein, 9 aa, synthetic construct
MQPLQTPYT

SEQ ID NO: 27350 - protein, 10 aa, synthetic construct
CRSSQSLRHS

SEQ ID NO: 27351 - protein, 9 aa, synthetic construct
ASNRAPGVP

SEQ ID NO: 27352 - protein, 9 aa, synthetic construct
DFTLKISTV

SEQ ID NO: 27353 - protein, 10 aa, synthetic construct
TFGQGTKLEI

SEQ ID NO: 27354 - protein, 9 aa, synthetic construct
TFGQGTKLE

SEQ ID NO: 27355 - protein, 9 aa, synthetic construct
TDFTLKIST

SEQ ID NO: 27356 - protein, 10 aa, synthetic construct
SLRHSNGYNY

SEQ ID NO: 27357 - protein, 9 aa, synthetic construct
QLLIYLASN

SEQ ID NO: 27358 - protein, 10 aa, synthetic construct
SNRAPGVPDR

SEQ ID NO: 27359 - protein, 10 aa, synthetic construct
HSNGYNYLGW

SEQ ID NO: 27360 - protein, 10 aa, synthetic construct
SQSLRHSNGY

SEQ ID NO: 27361 - protein, 10 aa, synthetic construct
FTLKISTVEA

SEQ ID NO: 27362 - protein, 9 aa, synthetic construct
STVEAEDVG

SEQ ID NO: 27363 - protein, 9 aa, synthetic construct
SCRSSQSLR

SEQ ID NO: 27364 - protein, 10 aa, synthetic construct
IYLASNRAPG

SEQ ID NO: 27365 - protein, 10 aa, synthetic construct
QPLQTPYTFG

SEQ ID NO: 27366 - protein, 10 aa, synthetic construct
GWYVQKPGQS

SEQ ID NO: 27367 - protein, 9 aa, synthetic construct
KAPNLLIYG

SEQ ID NO: 27368 - protein, 10 aa, synthetic construct
LIYGASNLET

SEQ ID NO: 27369 - protein, 9 aa, synthetic construct [sequence omitted]

SEQ ID NO: 27370 - protein, 10 aa, synthetic construct
QASEDISTYL

SEQ ID NO: 27371 - protein, 10 aa, synthetic construct
LTFGGGTKVD

SEQ ID NO: 27372 - protein, 10 aa, synthetic construct
FSGSGSETDF

SEQ ID NO: 27373 - protein, 9 aa, synthetic construct
QYDNLPLTF

SEQ ID NO: 27374 - protein, 9 aa, synthetic construct
QASEDISTY

SEQ ID NO: 27375 - protein, 10 aa, synthetic construct
QQKPGKAPNL

SEQ ID NO: 27376 - protein, 10 aa, synthetic construct
RFSGSGSETD

SEQ ID NO: 27377 - protein, 9 aa, synthetic construct
TITCQASED

SEQ ID NO: 27378 - protein, 10 aa, synthetic construct
EDISTYLSWY

SEQ ID NO: 27379 - protein, 9 aa, synthetic construct
FGGGTKVDI

SEQ ID NO: 27380 - protein, 9 aa, synthetic construct
PLTFGGGTK

SEQ ID NO: 27381 - protein, 9 aa, synthetic construct
NLPLTFGGG

SEQ ID NO: 27382 - protein, 9 aa, synthetic construct
SRFSGSGSE

SEQ ID NO: 27383 - protein, 9 aa, synthetic construct
VTITCQASE

SEQ ID NO: 27384 - protein, 10 aa, synthetic construct
FGGGTKVDIK

SEQ ID NO: 27385 - protein, 10 aa, synthetic construct
YQQKPGKAPN

SEQ ID NO: 27386 - protein, 9 aa, synthetic construct
EDISTYLSW

SEQ ID NO: 27387 - protein, 9 aa, synthetic construct
SGSGSETDF

SEQ ID NO: 27388 - protein, 9 aa, synthetic construct
DISTYLSWY

SEQ ID NO: 27389 - protein, 10 aa, synthetic construct
GSGSETDFTF

SEQ ID NO: 27390 - protein, 10 aa, synthetic construct
LSWYQQKPGK

SEQ ID NO: 27391 - protein, 9 aa, synthetic construct
DNLPLTFGG

SEQ ID NO: 27392 - protein, 9 aa, synthetic construct
PGKAPNLLI

SEQ ID NO: 27393 - protein, 10 aa, synthetic construct
SEDISTYLSW

SEQ ID NO: 27394 - protein, 10 aa, synthetic construct
QKPGKAPNLL

SEQ ID NO: 27395 - protein, 10 aa, synthetic construct
LPLTFGGGTK

SEQ ID NO: 27396 - protein, 9 aa, synthetic construct
SGSETDFTF

SEQ ID NO: 27397 - protein, 9 aa, synthetic construct
SETDFTFTI

SEQ ID NO: 27398 - protein, 10 aa, synthetic construct
SRFSGSGSET

SEQ ID NO: 27399 - protein, 10 aa, synthetic construct
LLIYGASNLE

SEQ ID NO: 27400 - protein, 10 aa, synthetic construct
DISTYLSWYQ

SEQ ID NO: 27401 - protein, 9 aa, synthetic construct
PNLLIYGAS

SEQ ID NO: 27402 - protein, 10 aa, synthetic construct
GASNLETGVP

SEQ ID NO: 27403 - protein, 9 aa, synthetic construct
ITCQASEDI

SEQ ID NO: 27404 - protein, 10 aa, synthetic construct
VTITCQASED

SEQ ID NO: 27405 - protein, 10 aa, synthetic construct
DNLPLTFGGG

SEQ ID NO: 27406 - protein, 9 aa, synthetic construct
YGASNLETG

SEQ ID NO: 27407 - protein, 9 aa, synthetic construct
GSETDFTFT

SEQ ID NO: 27408 - protein, 10 aa, synthetic construct
YCQQYDNLPL

SEQ ID NO: 27409 - protein, 10 aa, synthetic construct
CQASEDISTY

SEQ ID NO: 27410 - protein, 10 aa, synthetic construct
YLSWYQQKPG

SEQ ID NO: 27411 - protein, 9 aa, synthetic construct
LIYGASNLE

SEQ ID NO: 27412 - protein, 9 aa, synthetic construct
SWYQQKPGK

SEQ ID NO: 27413 - protein, 9 aa, synthetic construct
STYLSWYQQ

SEQ ID NO: 27414 - protein, 9 aa, synthetic construct
ETDFTFTIS

SEQ ID NO: 27415 - protein, 10 aa, synthetic construct
ETDFTFTISS

SEQ ID NO: 27416 - protein, 10 aa, synthetic construct
NLPLTFGGGT

SEQ ID NO: 27417 - protein, 9 aa, synthetic construct
TCQASEDIS

SEQ ID NO: 27418 - protein, 9 aa, synthetic construct
YDNLPLTFG

SEQ ID NO: 27419 - protein, 9 aa, synthetic construct
YLSWYQQKP

SEQ ID NO: 27420 - protein, 9 aa, synthetic construct
QQKPGKAPN

SEQ ID NO: 27421 - protein, 10 aa, synthetic construct
PLTFGGGTKV

SEQ ID NO: 27422 - protein, 10 aa, synthetic construct
SGSGSETDFT

SEQ ID NO: 27423 - protein, 10 aa, synthetic construct
ITCQASEDIS

SEQ ID NO: 27424 - protein, 10 aa, synthetic construct
NLLIYGASNL

SEQ ID NO: 27425 - protein, 10 aa, synthetic construct
TITCQASEDI

SEQ ID NO: 27426 - protein, 10 aa, synthetic construct
GSETDFTFTI

SEQ ID NO: 27427 - protein, 9 aa, synthetic construct
NLLIYGASN

SEQ ID NO: 27428 - protein, 10 aa, synthetic construct
PSRFSGSGSE

SEQ ID NO: 27429 - protein, 10 aa, synthetic construct
QQYDNLPLTF

SEQ ID NO: 27430 - protein, 10 aa, synthetic construct
SWYQQKPGKA

SEQ ID NO: 27431 - protein, 10 aa, synthetic construct
SETDFTFTIS

SEQ ID NO: 27432 - protein, 10 aa, synthetic construct
PNLLIYGASN

SEQ ID NO: 27433 - protein, 9 aa, synthetic construct
GSGSETDFT

SEQ ID NO: 27434 - protein, 9 aa, synthetic construct
IYGASNLET

SEQ ID NO: 27435 - protein, 9 aa, synthetic construct
FSGSGSETD

SEQ ID NO: 27436 - protein, 10 aa, synthetic construct
PGKAPNLLIY

SEQ ID NO: 27437 - protein, 10 aa, synthetic construct
STYLSWYQQK

SEQ ID NO: 27438 - protein, 10 aa, synthetic construct
KPGKAPNLLI

SEQ ID NO: 27439 - protein, 10 aa, synthetic construct
TCQASEDIST

SEQ ID NO: 27440 - protein, 9 aa, synthetic construct
KPGKAPNLL

SEQ ID NO: 27441 - protein, 9 aa, synthetic construct
CQASEDIST

SEQ ID NO: 27442 - protein, 9 aa, synthetic construct
SEDISTYLS

SEQ ID NO: 27443 - protein, 10 aa, synthetic construct
CQQYDNLPLT

SEQ ID NO: 27444 - protein, 10 aa, synthetic construct
TFGGGTKVDI

SEQ ID NO: 27445 - protein, 10 aa, synthetic construct
TYLSWYQQKP

SEQ ID NO: 27446 - protein, 10 aa, synthetic construct
YDNLPLTFGG

SEQ ID NO: 27447 - protein, 9 aa, synthetic construct
LSWYQQKPG

SEQ ID NO: 27448 - protein, 10 aa, synthetic construct
ISTYLSWYQQ

SEQ ID NO: 27449 - protein, 9 aa, synthetic construct
ASEDISTYL

SEQ ID NO: 27450 - protein, 9 aa, synthetic construct
TYLSWYQQK

SEQ ID NO: 27451 - protein, 10 aa, synthetic construct
IYGASNLETG

SEQ ID NO: 27452 - protein, 10 aa, synthetic construct
RVTITCQASE

SEQ ID NO: 27453 - protein, 10 aa, synthetic construct
ASEDISTYLS

SEQ ID NO: 27454 - protein, 9 aa, synthetic construct
GASNLETGV

SEQ ID NO: 27455 - protein, 10 aa, synthetic construct
APNLLIYGAS

SEQ ID NO: 27456 - protein, 9 aa, synthetic construct
TFGGGTKVD

SEQ ID NO: 27457 - protein, 10 aa, synthetic construct
GKAPNLLIYG

SEQ ID NO: 27458 - protein, 9 aa, synthetic construct
LLIYGASNL

SEQ ID NO: 27459 - protein, 9 aa, synthetic construct
QQYDNLPLT

SEQ ID NO: 27460 - protein, 9 aa, synthetic construct
LPLTFGGGT

SEQ ID NO: 27461 - protein, 10 aa, synthetic construct
SGSETDFTFT

SEQ ID NO: 27462 - protein, 10 aa, synthetic construct
YGASNLETGV

SEQ ID NO: 27463 - protein, 9 aa, synthetic construct
GKAPNLLIY

SEQ ID NO: 27464 - protein, 10 aa, synthetic construct
KAPNLLIYGA

SEQ ID NO: 27465 - protein, 10 aa, synthetic construct
QYDNLPLTFG

SEQ ID NO: 27466 - protein, 9 aa, synthetic construct
QKPGKAPNL

SEQ ID NO: 27467 - protein, 9 aa, synthetic construct
LTFGGGTKV

SEQ ID NO: 27468 - protein, 9 aa, synthetic construct
APNLLIYGA

SEQ ID NO: 27469 - protein, 9 aa, synthetic construct
ISTYLSWYQ

SEQ ID NO: 27470 - protein, 10 aa, synthetic construct
TATLTIRGTQ

SEQ ID NO: 27471 - protein, 10 aa, synthetic construct
LIFGGGTKLT

SEQ ID NO: 27472 - protein, 10 aa, synthetic construct
YCQTWETTTL

SEQ ID NO: 27473 - protein, 9 aa, synthetic construct
RPSGIPDRF

SEQ ID NO: 27474 - protein, 10 aa, synthetic construct
FSGSKSGDTA

SEQ ID NO: 27475 - protein, 9 aa, synthetic construct
SKSGDTATL

SEQ ID NO: 27476 - protein, 9 aa, synthetic construct
TIRGTQSED

SEQ ID NO: 27477 - protein, 10 aa, synthetic construct
EGDYYCQTWE

SEQ ID NO: 27478 - protein, 9 aa, synthetic construct
YYCQTWETT

SEQ ID NO: 27479 - protein, 9 aa, synthetic construct
EGDYYCQTW

SEQ ID NO: 27480 - protein, 10 aa, synthetic construct
GDYYCQTWET

SEQ ID NO: 27481 - protein, 9 aa, synthetic construct
IPDRFSGSK

SEQ ID NO: 27482 - protein, 9 aa, synthetic construct
FSGSKSGDT

SEQ ID NO: 27483 - protein, 10 aa, synthetic construct
YYCQTWETTT

SEQ ID NO: 27484 - protein, 10 aa, synthetic construct
RGTQSEDEGD

SEQ ID NO: 27485 - protein, 10 aa, synthetic construct
QTWETTTLIF

SEQ ID NO: 27486 - protein, 9 aa, synthetic construct
GIPDRFSGS

SEQ ID NO: 27487 - protein, 10 aa, synthetic construct
TLTIRGTQSE

SEQ ID NO: 27488 - protein, 9 aa, synthetic construct
SGSKSGDTA

SEQ ID NO: 27489 - protein, 10 aa, synthetic construct
FGGGTKLTVL

SEQ ID NO: 27490 - protein, 9 aa, synthetic construct
IFGGGTKLT

SEQ ID NO: 27491 - protein, 10 aa, synthetic construct
TQSEDEGDYY

SEQ ID NO: 27492 - protein, 9 aa, synthetic construct
QTWETTTLI

SEQ ID NO: 27493 - protein, 9 aa, synthetic construct
PDRFSGSKS

SEQ ID NO: 27494 - protein, 10 aa, synthetic construct
KSGDTATLTI

SEQ ID NO: 27495 - protein, 10 aa, synthetic construct
SKSGDTATLT

SEQ ID NO: 27496 - protein, 10 aa, synthetic construct
IPDRFSGSKS

SEQ ID NO: 27497 - protein, 10 aa, synthetic construct
SGIPDRFSGS

SEQ ID NO: 27498 - protein, 9 aa, synthetic construct
RGTQSEDEG

SEQ ID NO: 27499 - protein, 10 aa, synthetic construct
KRPSGIPDRF

SEQ ID NO: 27500 - protein, 9 aa, synthetic construct
TTTLIFGGG

SEQ ID NO: 27501 - protein, 10 aa, synthetic construct
IRGTQSEDEG

SEQ ID NO: 27502 - protein, 10 aa, synthetic construct
EDEGDYYCQT

SEQ ID NO: 27503 - protein, 10 aa, synthetic construct
LTIRGTQSED

SEQ ID NO: 27504 - protein, 9 aa, synthetic construct
DYYCQTWET

SEQ ID NO: 27505 - protein, 9 aa, synthetic construct
KRPSGIPDR

SEQ ID NO: 27506 - protein, 10 aa, synthetic construct
WETTTLIFGG

SEQ ID NO: 27507 - protein, 10 aa, synthetic construct
TIRGTQSEDE

SEQ ID NO: 27508 - protein, 9 aa, synthetic construct
DEGDYYCQT

SEQ ID NO: 27509 - protein, 9 aa, synthetic construct
IRGTQSEDE

SEQ ID NO: 27510 - protein, 10 aa, synthetic construct
TTLIFGGGTK

SEQ ID NO: 27511 - protein, 9 aa, synthetic construct
GTQSEDEGD

SEQ ID NO: 27512 - protein, 10 aa, synthetic construct
SGDTATLTIR

SEQ ID NO: 27513 - protein, 9 aa, synthetic construct
WETTTLIFG

SEQ ID NO: 27514 - protein, 9 aa, synthetic construct
RFSGSKSGD

SEQ ID NO: 27515 - protein, 9 aa, synthetic construct
DRFSGSKSG

SEQ ID NO: 27516 - protein, 9 aa, synthetic construct
SEDEGDYYC

SEQ ID NO: 27517 - protein, 10 aa, synthetic construct
TLIFGGGTKL

SEQ ID NO: 27518 - protein, 9 aa, synthetic construct
SGDTATLTI

SEQ ID NO: 27519 - protein, 10 aa, synthetic construct
GDTATLTIRG

SEQ ID NO: 27520 - protein, 10 aa, synthetic construct
TTTLIFGGGT

SEQ ID NO: 27521 - protein, 10 aa, synthetic construct
ATLTIRGTQS

SEQ ID NO: 27522 - protein, 10 aa, synthetic construct
QSEDEGDYYC

SEQ ID NO: 27523 - protein, 10 aa, synthetic construct
DEGDYYCQTW

SEQ ID NO: 27524 - protein, 10 aa, synthetic construct
IFGGGTKLTV

SEQ ID NO: 27525 - protein, 10 aa, synthetic construct
RFSGSKSGDT

SEQ ID NO: 27526 - protein, 9 aa, synthetic construct
LIFGGGTKL

SEQ ID NO: 27527 - protein, 10 aa, synthetic construct
TWETTTLIFG

SEQ ID NO: 27528 - protein, 9 aa, synthetic construct
TLTIRGTQS

SEQ ID NO: 27529 - protein, 10 aa, synthetic construct
CQTWETTTLI

SEQ ID NO: 27530 - protein, 9 aa, synthetic construct
PSGIPDRFS

SEQ ID NO: 27531 - protein, 9 aa, synthetic construct
EDEGDYYCQ

SEQ ID NO: 27532 - protein, 9 aa, synthetic construct
LTIRGTQSE

SEQ ID NO: 27533 - protein, 9 aa, synthetic construct
GSKSGDTAT

SEQ ID NO: 27534 - protein, 9 aa, synthetic construct
CQTWETTTL

SEQ ID NO: 27535 - protein, 9 aa, synthetic construct
TLIFGGGTK

SEQ ID NO: 27536 - protein, 9 aa, synthetic construct
FGGGTKLTV

SEQ ID NO: 27537 - protein, 9 aa, synthetic construct
ATLTIRGTQ

SEQ ID NO: 27538 - protein, 9 aa, synthetic construct
GDTATLTIR

SEQ ID NO: 27539 - protein, 9 aa, synthetic construct
QSEDEGDYY

SEQ ID NO: 27540 - protein, 9 aa, synthetic construct
TQSEDEGDY

SEQ ID NO: 27541 - protein, 10 aa, synthetic construct
PDRFSGSKSG

SEQ ID NO: 27542 - protein, 9 aa, synthetic construct
TWETTTLIF

SEQ ID NO: 27543 - protein, 9 aa, synthetic construct
KSGDTATLT

SEQ ID NO: 27544 - protein, 10 aa, synthetic construct
SGSKSGDTAT

SEQ ID NO: 27545 - protein, 10 aa, synthetic construct
RPSGIPDRFS

SEQ ID NO: 27546 - protein, 10 aa, synthetic construct
ETTTLIFGGG

SEQ ID NO: 27547 - protein, 10 aa, synthetic construct
GIPDRFSGSK

SEQ ID NO: 27548 - protein, 9 aa, synthetic construct
ETTTLIFGG

SEQ ID NO: 27549 - protein, 9 aa, synthetic construct
YCQTWETTT

SEQ ID NO: 27550 - protein, 10 aa, synthetic construct
DYYCQTWETT

SEQ ID NO: 27551 - protein, 10 aa, synthetic construct
GTQSEDEGDY

SEQ ID NO: 27552 - protein, 9 aa, synthetic construct
DTATLTIRG

SEQ ID NO: 27553 - protein, 10 aa, synthetic construct
SEDEGDYYCQ

SEQ ID NO: 27554 - protein, 9 aa, synthetic construct
GDYYCQTWE

SEQ ID NO: 27555 - protein, 10 aa, synthetic construct
DTATLTIRGT

SEQ ID NO: 27556 - protein, 10 aa, synthetic construct
GSKSGDTATL

SEQ ID NO: 27557 - protein, 9 aa, synthetic construct
SGIPDRFSG

SEQ ID NO: 27558 - protein, 9 aa, synthetic construct
TATLTIRGT

SEQ ID NO: 27559 - protein, 10 aa, synthetic construct
PSGIPDRFSG

SEQ ID NO: 27560 - protein, 9 aa, synthetic construct
TTLIFGGGT

SEQ ID NO: 27561 - protein, 10 aa, synthetic construct
DRFSGSKSGD

SEQ ID NO: 27562 - protein, 9 aa, synthetic construct
ASVGDRVTV

SEQ ID NO: 27563 - protein, 9 aa, synthetic construct
VTCRASQPI

SEQ ID NO: 27564 - protein, 10 aa, synthetic construct
YTASTLQSGV

SEQ ID NO: 27565 - protein, 10 aa, synthetic construct
KAPKLLIYTA

SEQ ID NO: 27566 - protein, 9 aa, synthetic construct
TFGGGTKVE

SEQ ID NO: 27567 - protein, 9 aa, synthetic construct
TNSFPLTFG

SEQ ID NO: 27568 - protein, 10 aa, synthetic construct
GWLAWYQQKP

SEQ ID NO: 27569 - protein, 9 aa, synthetic construct
DYTLTISSL

SEQ ID NO: 27570 - protein, 10 aa, synthetic construct
CQQTNSFPLT

SEQ ID NO: 27571 - protein, 9 aa, synthetic construct
YTASTLQSG

SEQ ID NO: 27572 - protein, 10 aa, synthetic construct
SGSGSGTDYT

SEQ ID NO: 27573 - protein, 10 aa, synthetic construct
FGGGTKVEMK

SEQ ID NO: 27574 - protein, 10 aa, synthetic construct
ATYYCQQTNS

SEQ ID NO: 27575 - protein, 10 aa, synthetic construct
SGTDYTLTIS

SEQ ID NO: 27576 - protein, 9 aa, synthetic construct
ATYYCQQTN

SEQ ID NO: 27577 - protein, 9 aa, synthetic construct
ASTLQSGVP

SEQ ID NO: 27578 - protein, 9 aa, synthetic construct
RVTVTCRAS

SEQ ID NO: 27579 - protein, 9 aa, synthetic construct
FATYYCQQT

SEQ ID NO: 27580 - protein, 10 aa, synthetic construct
TDYTLTISSL

SEQ ID NO: 27581 - protein, 9 aa, synthetic construct
RASQPIAGW

SEQ ID NO: 27582 - protein, 10 aa, synthetic construct
STLQSGVPSR

SEQ ID NO: 27583 - protein, 10 aa, synthetic construct
DYTLTISSLQ

SEQ ID NO: 27584 - protein, 9 aa, synthetic construct
SGSGTDYTL

SEQ ID NO: 27585 - protein, 10 aa, synthetic construct
FSGSGSGTDY

SEQ ID NO: 27586 - protein, 9 aa, synthetic construct
CQQTNSFPL

SEQ ID NO: 27587 - protein, 10 aa, synthetic construct
RASQPIAGWL

SEQ ID NO: 27588 - protein, 9 aa, synthetic construct
TYYCQQTNS

SEQ ID NO: 27589 - protein, 10 aa, synthetic construct
GSGSGTDYTL

SEQ ID NO: 27590 - protein, 10 aa, synthetic construct
LTFGGGTKVE

SEQ ID NO: 27591 - protein, 9 aa, synthetic construct
IYTASTLQS

SEQ ID NO: 27592 - protein, 9 aa, synthetic construct
DRVTVTCRA

SEQ ID NO: 27593 - protein, 9 aa, synthetic construct
TDYTLTISS

SEQ ID NO: 27594 - protein, 9 aa, synthetic construct
FGGGTKVEM

SEQ ID NO: 27595 - protein, 9 aa, synthetic construct
YTLTISSLQ

SEQ ID NO: 27596 - protein, 10 aa, synthetic construct
ASVGDRVTVT

SEQ ID NO: 27597 - protein, 10 aa, synthetic construct
GSGTDYTLTI

SEQ ID NO: 27598 - protein, 10 aa, synthetic construct
QTNSFPLTFG

SEQ ID NO: 27599 - protein, 10 aa, synthetic construct
SVGDRVTVTC

SEQ ID NO: 27600 - protein, 9 aa, synthetic construct
SGSGSGTDY

SEQ ID NO: 27601 - protein, 9 aa, synthetic construct
QQTNSFPLT

SEQ ID NO: 27602 - protein, 10 aa, synthetic construct
KLLIYTASTL

SEQ ID NO: 27603 - protein, 10 aa, synthetic construct
ASQPIAGWLA

SEQ ID NO: 27604 - protein, 9 aa, synthetic construct
SGTDYTLTI

SEQ ID NO: 27605 - protein, 9 aa, synthetic construct
LLIYTASTL

SEQ ID NO: 27606 - protein, 9 aa, synthetic construct
TASTLQSGV

SEQ ID NO: 27607 - protein, 10 aa, synthetic construct
NSFPLTFGGG

SEQ ID NO: 27608 - protein, 10 aa, synthetic construct
TFGGGTKVEM

SEQ ID NO: 27609 - protein, 9 aa, synthetic construct
SVGDRVTVT

SEQ ID NO: 27610 - protein, 9 aa, synthetic construct
NSFPLTFGG

SEQ ID NO: 27611 - protein, 9 aa, synthetic construct
LIYTASTLQ

SEQ ID NO: 27612 - protein, 10 aa, synthetic construct
QPIAGWLAWY

SEQ ID NO: 27613 - protein, 9 aa, synthetic construct
SQPIAGWLA

SEQ ID NO: 27614 - protein, 10 aa, synthetic construct
SGSGTDYTLT

SEQ ID NO: 27615 - protein, 10 aa, synthetic construct
PIAGWLAWYQ

SEQ ID NO: 27616 - protein, 9 aa, synthetic construct
VTVTCRASQ

SEQ ID NO: 27617 - protein, 10 aa, synthetic construct
TVTCRASQPI

SEQ ID NO: 27618 - protein, 9 aa, synthetic construct
STLQSGVPS

SEQ ID NO: 27619 - protein, 9 aa, synthetic construct
YCQQTNSFP

SEQ ID NO: 27620 - protein, 9 aa, synthetic construct
TLQSGVPSR

SEQ ID NO: 27621 - protein, 9 aa, synthetic construct
YYCQQTNSF

SEQ ID NO: 27622 - protein, 10 aa, synthetic construct
VTCRASQPIA

SEQ ID NO: 27623 - protein, 10 aa, synthetic construct
LIYTASTLQS

SEQ ID NO: 27624 - protein, 10 aa, synthetic construct
LLIYTASTLQ

SEQ ID NO: 27625 - protein, 9 aa, synthetic construct
ASQPIAGWL

SEQ ID NO: 27626 - protein, 10 aa, synthetic construct
DFATYYCQQT

SEQ ID NO: 27627 - protein, 9 aa, synthetic construct
APKLLIYTA

SEQ ID NO: 27628 - protein, 10 aa, synthetic construct
PKLLIYTAST

SEQ ID NO: 27629 - protein, 9 aa, synthetic construct
IAGWLAWYQ

SEQ ID NO: 27630 - protein, 9 aa, synthetic construct
TVTCRASQP

SEQ ID NO: 27631 - protein, 10 aa, synthetic construct
IAGWLAWYQQ

SEQ ID NO: 27632 - protein, 9 aa, synthetic construct
GSGTDYTLT

SEQ ID NO: 27633 - protein, 9 aa, synthetic construct
VGDRVTVTC

SEQ ID NO: 27634 - protein, 10 aa, synthetic construct
SASVGDRVTV

SEQ ID NO: 27635 - protein, 9 aa, synthetic construct
FPLTFGGGT

SEQ ID NO: 27636 - protein, 10 aa, synthetic construct
GDRVTVTCRA

SEQ ID NO: 27637 - protein, 10 aa, synthetic construct
VGDRVTVTCR

SEQ ID NO: 27638 - protein, 10 aa, synthetic construct
TCRASQPIAG

SEQ ID NO: 27639 - protein, 10 aa, synthetic construct
VTVTCRASQP

SEQ ID NO: 27640 - protein, 10 aa, synthetic construct
SFPLTFGGGT

SEQ ID NO: 27641 - protein, 10 aa, synthetic construct
SQPIAGWLAW

SEQ ID NO: 27642 - protein, 10 aa, synthetic construct
ASTLQSGVPS

SEQ ID NO: 27643 - protein, 10 aa, synthetic construct
TLQSGVPSRF

SEQ ID NO: 27644 - protein, 9 aa, synthetic construct
KAPKLLIYT

SEQ ID NO: 27645 - protein, 10 aa, synthetic construct
GKAPKLLIYT

SEQ ID NO: 27646 - protein, 9 aa, synthetic construct
SFPLTFGGG

SEQ ID NO: 27647 - protein, 9 aa, synthetic construct
PIAGWLAWY

SEQ ID NO: 27648 - protein, 9 aa, synthetic construct
QTNSFPLTF

SEQ ID NO: 27649 - protein, 10 aa, synthetic construct
RVTVTCRASQ

SEQ ID NO: 27650 - protein, 9 aa, synthetic construct
PKLLIYTAS

SEQ ID NO: 27651 - protein, 10 aa, synthetic construct
TNSFPLTFGG

SEQ ID NO: 27652 - protein, 10 aa, synthetic construct
FPLTFGGGTK

SEQ ID NO: 27653 - protein, 10 aa, synthetic construct
GTDYTLTISS

SEQ ID NO: 27654 - protein, 10 aa, synthetic construct
TYYCQQTNSF

SEQ ID NO: 27655 - protein, 10 aa, synthetic construct
DRVTVTCRAS

SEQ ID NO: 27656 - protein, 10 aa, synthetic construct
IYTASTLQSG

SEQ ID NO: 27657 - protein, 9 aa, synthetic construct
GTDYTLTIS

SEQ ID NO: 27658 - protein, 10 aa, synthetic construct
YCQQTNSFPL

SEQ ID NO: 27659 - protein, 10 aa, synthetic construct
FATYYCQQTN

SEQ ID NO: 27660 - protein, 9 aa, synthetic construct
QPIAGWLAW

SEQ ID NO: 27661 - protein, 9 aa, synthetic construct
GDRVTVTCR

SEQ ID NO: 27662 - protein, 9 aa, synthetic construct
GSGSGTDYT

SEQ ID NO: 27663 - protein, 10 aa, synthetic construct
QQTNSFPLTF

SEQ ID NO: 27664 - protein, 9 aa, synthetic construct
KLLIYTAST

SEQ ID NO: 27665 - protein, 10 aa, synthetic construct
APKLLIYTAS

SEQ ID NO: 27666 - protein, 9 aa, synthetic construct
GWLAWYQQK

SEQ ID NO: 27667 - protein, 10 aa, synthetic construct
YYCQQTNSFP

SEQ ID NO: 27668 - protein, 10 aa, synthetic construct
YTLTISSLQP

SEQ ID NO: 27669 - protein, 10 aa, synthetic construct
AGWLAWYQQK

SEQ ID NO: 27670 - protein, 10 aa, synthetic construct
CRASQPIAGW

SEQ ID NO: 27671 - protein, 10 aa, synthetic construct
TASTLQSGVP

SEQ ID NO: 27672 - protein, 9 aa, synthetic construct
CRASQPIAG

SEQ ID NO: 27673 - protein, 9 aa, synthetic construct
TCRASQPIA

SEQ ID NO: 27674 - protein, 9 aa, synthetic construct
AGWLAWYQQ

SEQ ID NO: 27675 - protein, 10 aa, synthetic construct
YCQQYGNSRT

SEQ ID NO: 27676 - protein, 9 aa, synthetic construct
QYGNSRTFG

SEQ ID NO: 27677 - protein, 10 aa, synthetic construct
PRLLIYSASS

SEQ ID NO: 27678 - protein, 10 aa, synthetic construct
RASQSISSSY

SEQ ID NO: 27679 - protein, 9 aa, synthetic construct
ASSRDTGIP

SEQ ID NO: 27680 - protein, 10 aa, synthetic construct
SSRDTGIPDR

SEQ ID NO: 27681 - protein, 9 aa, synthetic construct
GNSRTFGQG

SEQ ID NO: 27682 - protein, 9 aa, synthetic construct
DTGIPDRFS

SEQ ID NO: 27683 - protein, 10 aa, synthetic construct
IYSASSRDTG

SEQ ID NO: 27684 - protein, 10 aa, synthetic construct
SGTDFTLTIT

SEQ ID NO: 27685 - protein, 9 aa, synthetic construct
QSISSSYLA

SEQ ID NO: 27686 - protein, 10 aa, synthetic construct
DFTLTITRLE

SEQ ID NO: 27687 - protein, 9 aa, synthetic construct
RTFGQGTKV

SEQ ID NO: 27688 - protein, 9 aa, synthetic construct
YGNSRTFGQ

SEQ ID NO: 27689 - protein, 10 aa, synthetic construct
QSISSSYLAW

SEQ ID NO: 27690 - protein, 10 aa, synthetic construct
TDFTLTITRL

SEQ ID NO: 27691 - protein, 10 aa, synthetic construct
RTFGQGTKVE

SEQ ID NO: 27692 - protein, 10 aa, synthetic construct
SRDTGIPDRF

SEQ ID NO: 27693 - protein, 9 aa, synthetic construct
QAPRLLIYS

SEQ ID NO: 27694 - protein, 9 aa, synthetic construct
LTITRLEPE

SEQ ID NO: 27695 - protein, 9 aa, synthetic construct
VYYCQQYGN

SEQ ID NO: 27696 - protein, 10 aa, synthetic construct
QQYGNSRTFG

SEQ ID NO: 27697 - protein, 10 aa, synthetic construct
YGNSRTFGQG

SEQ ID NO: 27698 - protein, 10 aa, synthetic construct
LTITRLEPED

SEQ ID NO: 27699 - protein, 10 aa, synthetic construct
RLLIYSASSR

SEQ ID NO: 27700 - protein, 9 aa, synthetic construct
TLTITRLEP

SEQ ID NO: 27701 - protein, 9 aa, synthetic construct
ISSSYLAWY

SEQ ID NO: 27702 - protein, 10 aa, synthetic construct
YYCQQYGNSR

SEQ ID NO: 27703 - protein, 9 aa, synthetic construct
SRDTGIPDR

SEQ ID NO: 27704 - protein, 10 aa, synthetic construct
FTLTITRLEP

SEQ ID NO: 27705 - protein, 9 aa, synthetic construct
TRLEPEDFA

SEQ ID NO: 27706 - protein, 9 aa, synthetic construct
DFTLTITRL

SEQ ID NO: 27707 - protein, 10 aa, synthetic construct
RDTGIPDRFS

SEQ ID NO: 27708 - protein, 9 aa, synthetic construct
CQQYGNSRT

SEQ ID NO: 27709 - protein, 9 aa, synthetic construct
LIYSASSRD

SEQ ID NO: 27710 - protein, 10 aa, synthetic construct
YSASSRDTGI

SEQ ID NO: 27711 - protein, 10 aa, synthetic construct
TLTITRLEPE

SEQ ID NO: 27712 - protein, 10 aa, synthetic construct
ASSRDTGIPD

SEQ ID NO: 27713 - protein, 9 aa, synthetic construct
SRTFGQGTK

SEQ ID NO: 27714 - protein, 9 aa, synthetic construct
ITRLEPEDF

SEQ ID NO: 27715 - protein, 9 aa, synthetic construct
LSCRASQSI

SEQ ID NO: 27716 - protein, 9 aa, synthetic construct
RDTGIPDRF

SEQ ID NO: 27717 - protein, 10 aa, synthetic construct
LSCRASQSIS

SEQ ID NO: 27718 - protein, 9 aa, synthetic construct
FTLTITRLE

SEQ ID NO: 27719 - protein, 10 aa, synthetic construct
TRLEPEDFAV

SEQ ID NO: 27720 - protein, 9 aa, synthetic construct
FGQGTKVEV

SEQ ID NO: 27721 - protein, 10 aa, synthetic construct
AVYYCQQYGN

SEQ ID NO: 27722 - protein, 9 aa, synthetic construct
YSASSRDTG

SEQ ID NO: 27723 - protein, 9 aa, synthetic construct
SASSRDTGI

SEQ ID NO: 27724 - protein, 10 aa, synthetic construct
ITRLEPEDFA

SEQ ID NO: 27725 - protein, 10 aa, synthetic construct
GQAPRLLIYS

SEQ ID NO: 27726 - protein, 9 aa, synthetic construct
ASQSISSSY

SEQ ID NO: 27727 - protein, 9 aa, synthetic construct
IYSASSRDT

SEQ ID NO: 27728 - protein, 10 aa, synthetic construct
SISSSYLAWY

SEQ ID NO: 27729 - protein, 9 aa, synthetic construct
APRLLIYSA

SEQ ID NO: 27730 - protein, 10 aa, synthetic construct
GTDFTLTITR

SEQ ID NO: 27731 - protein, 9 aa, synthetic construct
LLIYSASSR

SEQ ID NO: 27732 - protein, 9 aa, synthetic construct
RLLIYSASS

SEQ ID NO: 27733 - protein, 10 aa, synthetic construct
SRTFGQGTKV

SEQ ID NO: 27734 - protein, 10 aa, synthetic construct
GNSRTFGQGT

SEQ ID NO: 27735 - protein, 10 aa, synthetic construct
TFGQGTKVEV

SEQ ID NO: 27736 - protein, 10 aa, synthetic construct
APRLLIYSAS

SEQ ID NO: 27737 - protein, 9 aa, synthetic construct
YCQQYGNSR

SEQ ID NO: 27738 - protein, 9 aa, synthetic construct
GTDFTLTIT

SEQ ID NO: 27739 - protein, 9 aa, synthetic construct
QQYGNSRTF

SEQ ID NO: 27740 - protein, 9 aa, synthetic construct
RASQSISSS

SEQ ID NO: 27741 - protein, 10 aa, synthetic construct
TLSCRASQSI

SEQ ID NO: 27742 - protein, 10 aa, synthetic construct
QAPRLLIYSA

SEQ ID NO: 27743 - protein, 9 aa, synthetic construct
PRLLIYSAS

SEQ ID NO: 27744 - protein, 10 aa, synthetic construct
VYYCQQYGNS

SEQ ID NO: 27745 - protein, 9 aa, synthetic construct
NSRTFGQGT

SEQ ID NO: 27746 - protein, 9 aa, synthetic construct
TFGQGTKVE

SEQ ID NO: 27747 - protein, 10 aa, synthetic construct
CRASQSISSS

SEQ ID NO: 27748 - protein, 10 aa, synthetic construct
TITRLEPEDF

SEQ ID NO: 27749 - protein, 10 aa, synthetic construct
NSRTFGQGTK

SEQ ID NO: 27750 - protein, 10 aa, synthetic construct
FGQGTKVEVK

SEQ ID NO: 27751 - protein, 10 aa, synthetic construct
SCRASQSISS

SEQ ID NO: 27752 - protein, 9 aa, synthetic construct
SSRDTGIPD

SEQ ID NO: 27753 - protein, 10 aa, synthetic construct
SASSRDTGIP

SEQ ID NO: 27754 - protein, 10 aa, synthetic construct
QYGNSRTFGQ

SEQ ID NO: 27755 - protein, 10 aa, synthetic construct
SQSISSSYLA

SEQ ID NO: 27756 - protein, 10 aa, synthetic construct
ISSSYLAWYQ

SEQ ID NO: 27757 - protein, 10 aa, synthetic construct
ASQSISSSYL

SEQ ID NO: 27758 - protein, 9 aa, synthetic construct
SQSISSSYL

SEQ ID NO: 27759 - protein, 9 aa, synthetic construct
TITRLEPED

SEQ ID NO: 27760 - protein, 9 aa, synthetic construct
YYCQQYGNS

SEQ ID NO: 27761 - protein, 9 aa, synthetic construct
SCRASQSIS

SEQ ID NO: 27762 - protein, 9 aa, synthetic construct
CRASQSISS

SEQ ID NO: 27763 - protein, 9 aa, synthetic construct
TDFTLTITR

SEQ ID NO: 27764 - protein, 10 aa, synthetic construct
DTGIPDRFSG

SEQ ID NO: 27765 - protein, 10 aa, synthetic construct
LLIYSASSRD

SEQ ID NO: 27766 - protein, 9 aa, synthetic construct
SISSSYLAW

SEQ ID NO: 27767 - protein, 10 aa, synthetic construct
LIYSASSRDT

SEQ ID NO: 27768 - protein, 9 aa, synthetic construct
GSTSGTIVT

SEQ ID NO: 27769 - protein, 9 aa, synthetic construct
QSGDSSGPW

SEQ ID NO: 27770 - protein, 9 aa, synthetic construct
GDALPKQYT

SEQ ID NO: 27771 - protein, 9 aa, synthetic construct
DSSGPWVFG

SEQ ID NO: 27772 - protein, 9 aa, synthetic construct
MLMISKDSE

SEQ ID NO: 27773 - protein, 9 aa, synthetic construct
LMISKDSER

SEQ ID NO: 27774 - protein, 10 aa, synthetic construct
PGQAPMLMIS

SEQ ID NO: 27775 - protein, 9 aa, synthetic construct
IISGVQAED

SEQ ID NO: 27776 - protein, 9 aa, synthetic construct
IPERFSGST

SEQ ID NO: 27777 - protein, 10 aa, synthetic construct
LTQPPSVSVS

SEQ ID NO: 27778 - protein, 9 aa, synthetic construct
YYCQSGDSS

SEQ ID NO: 27779 - protein, 10 aa, synthetic construct
STSGTIVTLI

SEQ ID NO: 27780 - protein, 9 aa, synthetic construct
WVFGGGTKL

SEQ ID NO: 27781 - protein, 9 aa, synthetic construct
GQAPMLMIS

SEQ ID NO: 27782 - protein, 10 aa, synthetic construct
YYCQSGDSSG

SEQ ID NO: 27783 - protein, 10 aa, synthetic construct
ADYYCQSGDS

SEQ ID NO: 27784 - protein, 10 aa, synthetic construct
ERFSGSTSGT

SEQ ID NO: 27785 - protein, 9 aa, synthetic construct
IVTLIISGV

SEQ ID NO: 27786 - protein, 10 aa, synthetic construct
ELTQPPSVSV

SEQ ID NO: 27787 - protein, 10 aa, synthetic construct
QSGDSSGPWV

SEQ ID NO: 27788 - protein, 9 aa, synthetic construct
YCQSGDSSG

SEQ ID NO: 27789 - protein, 10 aa, synthetic construct
LPKQYTYWYQ

SEQ ID NO: 27790 - protein, 10 aa, synthetic construct
GPWVFGGGTK

SEQ ID NO: 27791 - protein, 9 aa, synthetic construct
LIISGVQAE

SEQ ID NO: 27792 - protein, 10 aa, synthetic construct
RFSGSTSGTI

SEQ ID NO: 27793 - protein, 10 aa, synthetic construct
MLMISKDSER

SEQ ID NO: 27794 - protein, 10 aa, synthetic construct
SKDSERPSGI

SEQ ID NO: 27795 - protein, 10 aa, synthetic construct
TSGTIVTLII

SEQ ID NO: 27796 - protein, 9 aa, synthetic construct
SKDSERPSG

SEQ ID NO: 27797 - protein, 10 aa, synthetic construct
DEADYYCQSG

SEQ ID NO: 27798 - protein, 9 aa, synthetic construct
TIVTLIISG

SEQ ID NO: 27799 - protein, 9 aa, synthetic construct
SYELTQPPS

SEQ ID NO: 27800 - protein, 9 aa, synthetic construct
TSGTIVTLI

SEQ ID NO: 27801 - protein, 10 aa, synthetic construct
CQSGDSSGPW

SEQ ID NO: 27802 - protein, 9 aa, synthetic construct
ALPKQYTYW

SEQ ID NO: 27803 - protein, 9 aa, synthetic construct
PKQYTYWYQ

SEQ ID NO: 27804 - protein, 10 aa, synthetic construct
MISKDSERPS

SEQ ID NO: 27805 - protein, 9 aa, synthetic construct
ADYYCQSGD

SEQ ID NO: 27806 - protein, 10 aa, synthetic construct
SSGPWVFGGG

SEQ ID NO: 27807 - protein, 9 aa, synthetic construct
LTQPPSVSV

SEQ ID NO: 27808 - protein, 9 aa, synthetic construct
CQSGDSSGP

SEQ ID NO: 27809 - protein, 10 aa, synthetic construct
KQYTYWYQQK

SEQ ID NO: 27810 - protein, 10 aa, synthetic construct
ISKDSERPSG

SEQ ID NO: 27811 - protein, 9 aa, synthetic construct
PMLMISKDS

SEQ ID NO: 27812 - protein, 10 aa, synthetic construct
QKPGQAPMLM

SEQ ID NO: 27813 - protein, 9 aa, synthetic construct
PERFSGSTS

SEQ ID NO: 27814 - protein, 9 aa, synthetic construct
VTLIISGVQ

SEQ ID NO: 27815 - protein, 9 aa, synthetic construct
PGQAPMLMI

SEQ ID NO: 27816 - protein, 10 aa, synthetic construct
SGTIVTLIIS

SEQ ID NO: 27817 - protein, 9 aa, synthetic construct
QAPMLMISK

SEQ ID NO: 27818 - protein, 9 aa, synthetic construct
KPGQAPMLM

SEQ ID NO: 27819 - protein, 10 aa, synthetic construct
YCQSGDSSGP

SEQ ID NO: 27820 - protein, 10 aa, synthetic construct
IVTLIISGVQ

SEQ ID NO: 27821 - protein, 10 aa, synthetic construct
TQPPSVSVSP

SEQ ID NO: 27822 - protein, 10 aa, synthetic construct
QAPMLMISKD

SEQ ID NO: 27823 - protein, 10 aa, synthetic construct
GQAPMLMISK

SEQ ID NO: 27824 - protein, 9 aa, synthetic construct
SGSTSGTIV

SEQ ID NO: 27825 - protein, 10 aa, synthetic construct
TLIISGVQAE

SEQ ID NO: 27826 - protein, 10 aa, synthetic construct
ALPKQYTYWY

SEQ ID NO: 27827 - protein, 10 aa, synthetic construct
PERFSGSTSG

SEQ ID NO: 27828 - protein, 10 aa, synthetic construct
DALPKQYTYW

SEQ ID NO: 27829 - protein, 9 aa, synthetic construct
GTIVTLIIS

SEQ ID NO: 27830 - protein, 9 aa, synthetic construct
SGPWVFGGG

SEQ ID NO: 27831 - protein, 9 aa, synthetic construct
SGTIVTLII

SEQ ID NO: 27832 - protein, 10 aa, synthetic construct
IPERFSGSTS

SEQ ID NO: 27833 - protein, 10 aa, synthetic construct
DSSGPWVFGG

SEQ ID NO: 27834 - protein, 9 aa, synthetic construct
SGDSSGPWV

SEQ ID NO: 27835 - protein, 9 aa, synthetic construct
ELTQPPSVS

SEQ ID NO: 27836 - protein, 9 aa, synthetic construct
KQYTYWYQQ

SEQ ID NO: 27837 - protein, 10 aa, synthetic construct
EADYYCQSGD

SEQ ID NO: 27838 - protein, 10 aa, synthetic construct
QQKPGQAPML

SEQ ID NO: 27839 - protein, 10 aa, synthetic construct
PWVFGGGTKL

SEQ ID NO: 27840 - protein, 9 aa, synthetic construct
QQKPGQAPM

SEQ ID NO: 27841 - protein, 9 aa, synthetic construct
DYYCQSGDS

SEQ ID NO: 27842 - protein, 10 aa, synthetic construct
IISGVQAEDE

SEQ ID NO: 27843 - protein, 9 aa, synthetic construct
SSGPWVFGG

SEQ ID NO: 27844 - protein, 9 aa, synthetic construct
STSGTIVTL

SEQ ID NO: 27845 - protein, 10 aa, synthetic construct
GSTSGTIVTL

SEQ ID NO: 27846 - protein, 10 aa, synthetic construct
YQQKPGQAPM

SEQ ID NO: 27847 - protein, 9 aa, synthetic construct
LPKQYTYWY

SEQ ID NO: 27848 - protein, 9 aa, synthetic construct
PWVFGGGTK

SEQ ID NO: 27849 - protein, 10 aa, synthetic construct
VFGGGTKLTV

SEQ ID NO: 27850 - protein, 10 aa, synthetic construct
YELTQPPSVS

SEQ ID NO: 27851 - protein, 9 aa, synthetic construct
QKPGQAPML

SEQ ID NO: 27852 - protein, 10 aa, synthetic construct
PMLMISKDSE

SEQ ID NO: 27853 - protein, 10 aa, synthetic construct
DYYCQSGDSS

SEQ ID NO: 27854 - protein, 9 aa, synthetic construct
GDSSGPWVF

SEQ ID NO: 27855 - protein, 9 aa, synthetic construct
GPWVFGGGT

SEQ ID NO: 27856 - protein, 9 aa, synthetic construct
ERFSGSTSG

SEQ ID NO: 27857 - protein, 10 aa, synthetic construct
SGPWVFGGGT

SEQ ID NO: 27858 - protein, 9 aa, synthetic construct
QYTYWYQQK

SEQ ID NO: 27859 - protein, 10 aa, synthetic construct
GDSSGPWVFG

SEQ ID NO: 27860 - protein, 10 aa, synthetic construct
LIISGVQAED

SEQ ID NO: 27861 - protein, 9 aa, synthetic construct
TLIISGVQA

SEQ ID NO: 27862 - protein, 10 aa, synthetic construct
TYWYQQKPGQ

SEQ ID NO: 27863 - protein, 10 aa, synthetic construct
GIPERFSGST

SEQ ID NO: 27864 - protein, 9 aa, synthetic construct
VFGGGTKLT

SEQ ID NO: 27865 - protein, 10 aa, synthetic construct
KPGQAPMLMI

SEQ ID NO: 27866 - protein, 10 aa, synthetic construct
QYTYWYQQKP

SEQ ID NO: 27867 - protein, 10 aa, synthetic construct
WVFGGGTKLT

SEQ ID NO: 27868 - protein, 10 aa, synthetic construct
YTYWYQQKPG

SEQ ID NO: 27869 - protein, 10 aa, synthetic construct
GTIVTLIISG

SEQ ID NO: 27870 - protein, 10 aa, synthetic construct
VTLIISGVQA

SEQ ID NO: 27871 - protein, 10 aa, synthetic construct
GDALPKQYTY

SEQ ID NO: 27872 - protein, 10 aa, synthetic construct
SGSTSGTIVT

SEQ ID NO: 27873 - protein, 9 aa, synthetic construct
TQPPSVSVS

SEQ ID NO: 27874 - protein, 9 aa, synthetic construct
RFSGSTSGT

SEQ ID NO: 27875 - protein, 9 aa, synthetic construct
DALPKQYTY

SEQ ID NO: 27876 - protein, 10 aa, synthetic construct
LMISKDSERP

SEQ ID NO: 27877 - protein, 10 aa, synthetic construct
SGDSSGPWVF

SEQ ID NO: 27878 - protein, 9 aa, synthetic construct
TYWYQQKPG

SEQ ID NO: 27879 - protein, 9 aa, synthetic construct
MISKDSERP

SEQ ID NO: 27880 - protein, 10 aa, synthetic construct
SYELTQPPSV

SEQ ID NO: 27881 - protein, 9 aa, synthetic construct
YELTQPPSV

SEQ ID NO: 27882 - protein, 10 aa, synthetic construct
PKQYTYWYQQ

SEQ ID NO: 27883 - protein, 10 aa, synthetic construct
FSGSTSGTIV

SEQ ID NO: 27884 - protein, 9 aa, synthetic construct
FSGSTSGTI

SEQ ID NO: 27885 - protein, 10 aa, synthetic construct
APMLMISKDS

SEQ ID NO: 27886 - protein, 10 aa, synthetic construct
TIVTLIISGV

SEQ ID NO: 27887 - protein, 9 aa, synthetic construct
ISKDSERPS

SEQ ID NO: 27888 - protein, 10 aa, synthetic construct
SGDALPKQYT

SEQ ID NO: 27889 - protein, 9 aa, synthetic construct
APMLMISKD

SEQ ID NO: 27890 - protein, 9 aa, synthetic construct
EADYYCQSG

SEQ ID NO: 27891 - protein, 9 aa, synthetic construct
YTYWYQQKP

SEQ ID NO: 27892 - protein, 10 aa, synthetic construct
DIPDRFTGSG

SEQ ID NO: 27893 - protein, 9 aa, synthetic construct
PSLLIYAAS

SEQ ID NO: 27894 - protein, 9 aa, synthetic construct
CGANQTVDK

SEQ ID NO: 27895 - protein, 9 aa, synthetic construct
GSGTDFSLT

SEQ ID NO: 27896 - protein, 10 aa, synthetic construct
ASLRATDIPD

SEQ ID NO: 27897 - protein, 10 aa, synthetic construct
DRFTGSGSGT

SEQ ID NO: 27898 - protein, 9 aa, synthetic construct
NQTVDKNYL

SEQ ID NO: 27899 - protein, 9 aa, synthetic construct
WYRQKPGLA

SEQ ID NO: 27900 - protein, 10 aa, synthetic construct
QTVDKNYLAW

SEQ ID NO: 27901 - protein, 10 aa, synthetic construct
TDFSLTISRV

SEQ ID NO: 27902 - protein, 9 aa, synthetic construct
VDKNYLAWY

SEQ ID NO: 27903 - protein, 9 aa, synthetic construct
FTGSGSGTD

SEQ ID NO: 27904 - protein, 9 aa, synthetic construct
LAPSLLIYA

SEQ ID NO: 27905 - protein, 9 aa, synthetic construct
ATLSCGANQ

SEQ ID NO: 27906 - protein, 10 aa, synthetic construct
TPLTFGGGTK

SEQ ID NO: 27907 - protein, 10 aa, synthetic construct
NQTVDKNYLA

SEQ ID NO: 27908 - protein, 9 aa, synthetic construct
NYLAWYRQK

SEQ ID NO: 27909 - protein, 9 aa, synthetic construct
SGSGTDFSL

SEQ ID NO: 27910 - protein, 10 aa, synthetic construct
YRQKPGLAPS

SEQ ID NO: 27911 - protein, 10 aa, synthetic construct
YCQQYGRTPL

SEQ ID NO: 27912 - protein, 9 aa, synthetic construct
CQQYGRTPL

SEQ ID NO: 27913 - protein, 9 aa, synthetic construct
YGRTPLTFG

SEQ ID NO: 27914 - protein, 10 aa, synthetic construct
PGLAPSLLIY

SEQ ID NO: 27915 - protein, 9 aa, synthetic construct
YCQQYGRTP

SEQ ID NO: 27916 - protein, 10 aa, synthetic construct
YYCQQYGRTP

SEQ ID NO: 27917 - protein, 9 aa, synthetic construct
IYAASLRAT

SEQ ID NO: 27918 - protein, 9 aa, synthetic construct
GSGSGTDFS

SEQ ID NO: 27919 - protein, 9 aa, synthetic construct
RQKPGLAPS

SEQ ID NO: 27920 - protein, 10 aa, synthetic construct
LLIYAASLRA

SEQ ID NO: 27921 - protein, 10 aa, synthetic construct
SLRATDIPDR

SEQ ID NO: 27922 - protein, 9 aa, synthetic construct
QKPGLAPSL

SEQ ID NO: 27923 - protein, 9 aa, synthetic construct
RATLSCGAN

SEQ ID NO: 27924 - protein, 10 aa, synthetic construct
VDKNYLAWYR

SEQ ID NO: 27925 - protein, 9 aa, synthetic construct
LLIYAASLR

SEQ ID NO: 27926 - protein, 9 aa, synthetic construct
TVDKNYLAW

SEQ ID NO: 27927 - protein, 9 aa, synthetic construct
ANQTVDKNY

SEQ ID NO: 27928 - protein, 10 aa, synthetic construct
TDIPDRFTGS

SEQ ID NO: 27929 - protein, 9 aa, synthetic construct
DIPDRFTGS

SEQ ID NO: 27930 - protein, 9 aa, synthetic construct
APSLLIYAA

SEQ ID NO: 27931 - protein, 9 aa, synthetic construct
TISRVEPED

SEQ ID NO: 27932 - protein, 10 aa, synthetic construct
KNYLAWYRQK

SEQ ID NO: 27933 - protein, 9 aa, synthetic construct
LRATDIPDR

SEQ ID NO: 27934 - protein, 10 aa, synthetic construct
DFSLTISRVE

SEQ ID NO: 27935 - protein, 9 aa, synthetic construct
RVEPEDFAV

SEQ ID NO: 27936 - protein, 9 aa, synthetic construct
TDIPDRFTG

SEQ ID NO: 27937 - protein, 10 aa, synthetic construct
YLAWYRQKPG

SEQ ID NO: 27938 - protein, 10 aa, synthetic construct
CGANQTVDKN

SEQ ID NO: 27939 - protein, 9 aa, synthetic construct
GLAPSLLIY

SEQ ID NO: 27940 - protein, 9 aa, synthetic construct
DRFTGSGSG

SEQ ID NO: 27941 - protein, 10 aa, synthetic construct
ANQTVDKNYL

SEQ ID NO: 27942 - protein, 10 aa, synthetic construct
LAPSLLIYAA

SEQ ID NO: 27943 - protein, 10 aa, synthetic construct
SGSGTDFSLT

SEQ ID NO: 27944 - protein, 9 aa, synthetic construct
TGSGSGTDF

SEQ ID NO: 27945 - protein, 9 aa, synthetic construct
PGLAPSLLI

SEQ ID NO: 27946 - protein, 9 aa, synthetic construct
QYGRTPLTF

SEQ ID NO: 27947 - protein, 10 aa, synthetic construct
LRATDIPDRF

SEQ ID NO: 27948 - protein, 9 aa, synthetic construct
VEPEDFAVY

SEQ ID NO: 27949 - protein, 10 aa, synthetic construct
DKNYLAWYRQ

SEQ ID NO: 27950 - protein, 10 aa, synthetic construct
LTISRVEPED

SEQ ID NO: 27951 - protein, 10 aa, synthetic construct
TLSCGANQTV

SEQ ID NO: 27952 - protein, 9 aa, synthetic construct
KNYLAWYRQ

SEQ ID NO: 27953 - protein, 10 aa, synthetic construct
VYYCQQYGRT

SEQ ID NO: 27954 - protein, 9 aa, synthetic construct
LTISRVEPE

SEQ ID NO: 27955 - protein, 10 aa, synthetic construct
ATLSCGANQT

SEQ ID NO: 27956 - protein, 9 aa, synthetic construct
DFSLTISRV

SEQ ID NO: 27957 - protein, 10 aa, synthetic construct
GANQTVDKNY

SEQ ID NO: 27958 - protein, 9 aa, synthetic construct
SGTDFSLTI

SEQ ID NO: 27959 - protein, 10 aa, synthetic construct
GLAPSLLIYA

SEQ ID NO: 27960 - protein, 10 aa, synthetic construct
VEPEDFAVYY

SEQ ID NO: 27961 - protein, 10 aa, synthetic construct
FSLTISRVEP

SEQ ID NO: 27962 - protein, 10 aa, synthetic construct
IPDRFTGSGS

SEQ ID NO: 27963 - protein, 10 aa, synthetic construct
RTPLTFGGGT

SEQ ID NO: 27964 - protein, 9 aa, synthetic construct
DKNYLAWYR

SEQ ID NO: 27965 - protein, 9 aa, synthetic construct
SLRATDIPD

SEQ ID NO: 27966 - protein, 10 aa, synthetic construct
FTGSGSGTDF

SEQ ID NO: 27967 - protein, 10 aa, synthetic construct
SLTISRVEPE

SEQ ID NO: 27968 - protein, 9 aa, synthetic construct
YRQKPGLAP

SEQ ID NO: 27969 - protein, 10 aa, synthetic construct
APSLLIYAAS

SEQ ID NO: 27970 - protein, 10 aa, synthetic construct
TFGGGTKVEI

SEQ ID NO: 27971 - protein, 10 aa, synthetic construct
SLLIYAASLR

SEQ ID NO: 27972 - protein, 9 aa, synthetic construct
SRVEPEDFA

SEQ ID NO: 27973 - protein, 10 aa, synthetic construct
WYRQKPGLAP

SEQ ID NO: 27974 - protein, 10 aa, synthetic construct
ISRVEPEDFA

SEQ ID NO: 27975 - protein, 9 aa, synthetic construct
LIYAASLRA

SEQ ID NO: 27976 - protein, 9 aa, synthetic construct
GANQTVDKN

SEQ ID NO: 27977 - protein, 10 aa, synthetic construct
AASLRATDIP

SEQ ID NO: 27978 - protein, 10 aa, synthetic construct
SRVEPEDFAV

SEQ ID NO: 27979 - protein, 10 aa, synthetic construct
TVDKNYLAWY

SEQ ID NO: 27980 - protein, 9 aa, synthetic construct
VYYCQQYGR

SEQ ID NO: 27981 - protein, 9 aa, synthetic construct
FSLTISRVE

SEQ ID NO: 27982 - protein, 10 aa, synthetic construct
ATDIPDRFTG

SEQ ID NO: 27983 - protein, 10 aa, synthetic construct
GSGTDFSLTI

SEQ ID NO: 27984 - protein, 10 aa, synthetic construct
TGSGSGTDFS

SEQ ID NO: 27985 - protein, 10 aa, synthetic construct
PSLLIYAASL

SEQ ID NO: 27986 - protein, 10 aa, synthetic construct
TISRVEPEDF

SEQ ID NO: 27987 - protein, 9 aa, synthetic construct
SCGANQTVD

SEQ ID NO: 27988 - protein, 9 aa, synthetic construct
AASLRATDI

SEQ ID NO: 27989 - protein, 10 aa, synthetic construct
GSGSGTDFSL

SEQ ID NO: 27990 - protein, 10 aa, synthetic construct
LSCGANQTVD

SEQ ID NO: 27991 - protein, 10 aa, synthetic construct
PDRFTGSGSG

SEQ ID NO: 27992 - protein, 10 aa, synthetic construct
RQKPGLAPSL

SEQ ID NO: 27993 - protein, 9 aa, synthetic construct
YAASLRATD

SEQ ID NO: 27994 - protein, 10 aa, synthetic construct
YGRTPLTFGG

SEQ ID NO: 27995 - protein, 10 aa, synthetic construct
RATDIPDRFT

SEQ ID NO: 27996 - protein, 9 aa, synthetic construct
TPLTFGGGT

SEQ ID NO: 27997 - protein, 10 aa, synthetic construct
AWYRQKPGLA

SEQ ID NO: 27998 - protein, 9 aa, synthetic construct
QQYGRTPLT

SEQ ID NO: 27999 - protein, 9 aa, synthetic construct
RTPLTFGGG

SEQ ID NO: 28000 - protein, 9 aa, synthetic construct
ASLRATDIP

SEQ ID NO: 28001 - protein, 9 aa, synthetic construct
GTDFSLTIS

SEQ ID NO: 28002 - protein, 10 aa, synthetic construct
SCGANQTVDK

SEQ ID NO: 28003 - protein, 9 aa, synthetic construct
LAWYRQKPG

SEQ ID NO: 28004 - protein, 9 aa, synthetic construct
ATDIPDRFT

SEQ ID NO: 28005 - protein, 9 aa, synthetic construct
AWYRQKPGL

SEQ ID NO: 28006 - protein, 9 aa, synthetic construct
YLAWYRQKP

SEQ ID NO: 28007 - protein, 9 aa, synthetic construct
QTVDKNYLA

SEQ ID NO: 28008 - protein, 9 aa, synthetic construct
ISRVEPEDF

SEQ ID NO: 28009 - protein, 9 aa, synthetic construct
TDFSLTISR

SEQ ID NO: 28010 - protein, 10 aa, synthetic construct
QYGRTPLTFG

SEQ ID NO: 28011 - protein, 9 aa, synthetic construct
RFTGSGSGT

SEQ ID NO: 28012 - protein, 9 aa, synthetic construct
TLSCGANQT

SEQ ID NO: 28013 - protein, 9 aa, synthetic construct
RATDIPDRF

SEQ ID NO: 28014 - protein, 9 aa, synthetic construct
YYCQQYGRT

SEQ ID NO: 28015 - protein, 10 aa, synthetic construct
SGTDFSLTIS

SEQ ID NO: 28016 - protein, 10 aa, synthetic construct
QKPGLAPSLL

SEQ ID NO: 28017 - protein, 10 aa, synthetic construct
ERATLSCGAN

SEQ ID NO: 28018 - protein, 10 aa, synthetic construct
IYAASLRATD

SEQ ID NO: 28019 - protein, 10 aa, synthetic construct
GTDFSLTISR

SEQ ID NO: 28020 - protein, 9 aa, synthetic construct
PDRFTGSGS

SEQ ID NO: 28021 - protein, 9 aa, synthetic construct
IPDRFTGSG

SEQ ID NO: 28022 - protein, 10 aa, synthetic construct
YAASLRATDI

SEQ ID NO: 28023 - protein, 10 aa, synthetic construct
RFTGSGSGTD

SEQ ID NO: 28024 - protein, 10 aa, synthetic construct
KPGLAPSLLI

SEQ ID NO: 28025 - protein, 10 aa, synthetic construct
AVYYCQQYGR

SEQ ID NO: 28026 - protein, 10 aa, synthetic construct
FGGGTKVEIK

SEQ ID NO: 28027 - protein, 10 aa, synthetic construct
NYLAWYRQKP

SEQ ID NO: 28028 - protein, 9 aa, synthetic construct
SLTISRVEP

SEQ ID NO: 28029 - protein, 10 aa, synthetic construct
RVEPEDFAVY

SEQ ID NO: 28030 - protein, 10 aa, synthetic construct
LIYAASLRAT

SEQ ID NO: 28031 - protein, 9 aa, synthetic construct
SLLIYAASL

SEQ ID NO: 28032 - protein, 9 aa, synthetic construct
GRTPLTFGG

SEQ ID NO: 28033 - protein, 10 aa, synthetic construct
RATLSCGANQ

SEQ ID NO: 28034 - protein, 10 aa, synthetic construct
CQQYGRTPLT

SEQ ID NO: 28035 - protein, 10 aa, synthetic construct
QQYGRTPLTF

SEQ ID NO: 28036 - protein, 9 aa, synthetic construct
LSCGANQTV

SEQ ID NO: 28037 - protein, 9 aa, synthetic construct
KPGLAPSLL

SEQ ID NO: 28038 - protein, 9 aa, synthetic construct
FGGGTKVEI

SEQ ID NO: 28039 - protein, 10 aa, synthetic construct
LAWYRQKPGL

SEQ ID NO: 28040 - protein, 10 aa, synthetic construct
GRTPLTFGGG

SEQ ID NO: 28041 - protein, 10 aa, synthetic construct
YKFNNKEYLA

SEQ ID NO: 28042 - protein, 9 aa, synthetic construct
PPKLLMYWA

SEQ ID NO: 28043 - protein, 9 aa, synthetic construct
YKFNNKEYL

SEQ ID NO: 28044 - protein, 10 aa, synthetic construct
FTLTISRLQP

SEQ ID NO: 28045 - protein, 10 aa, synthetic construct
KSSQTLLYKF

SEQ ID NO: 28046 - protein, 10 aa, synthetic construct
PKLLMYWAST

SEQ ID NO: 28047 - protein, 9 aa, synthetic construct
EYLAWYQQK

SEQ ID NO: 28048 - protein, 10 aa, synthetic construct
ATINCKSSQT

SEQ ID NO: 28049 - protein, 9 aa, synthetic construct
IYYCQQYFT

SEQ ID NO: 28050 - protein, 10 aa, synthetic construct
YYCQQYFTTP

SEQ ID NO: 28051 - protein, 9 aa, synthetic construct
PEDVAIYYC

SEQ ID NO: 28052 - protein, 9 aa, synthetic construct
VAIYYCQQY

SEQ ID NO: 28053 - protein, 10 aa, synthetic construct
INCKSSQTLL

SEQ ID NO: 28054 - protein, 10 aa, synthetic construct
QPPKLLMYWA

SEQ ID NO: 28055 - protein, 10 aa, synthetic construct
KEYLAWYQQK

SEQ ID NO: 28056 - protein, 9 aa, synthetic construct
TPFAFGQGT

SEQ ID NO: 28057 - protein, 10 aa, synthetic construct
GQPPKLLMYW

SEQ ID NO: 28058 - protein, 9 aa, synthetic construct
QTLLYKFNN

SEQ ID NO: 28059 - protein, 9 aa, synthetic construct
FNNKEYLAW

SEQ ID NO: 28060 - protein, 9 aa, synthetic construct
TINCKSSQT

SEQ ID NO: 28061 - protein, 9 aa, synthetic construct
QPEDVAIYY

SEQ ID NO: 28062 - protein, 9 aa, synthetic construct
TISRLQPED

SEQ ID NO: 28063 - protein, 10 aa, synthetic construct
TLLYKFNNKE

SEQ ID NO: 28064 - protein, 9 aa, synthetic construct
DVAIYYCQQ

SEQ ID NO: 28065 - protein, 9 aa, synthetic construct
AFGQGTKVE

SEQ ID NO: 28066 - protein, 10 aa, synthetic construct
ISRLQPEDVA

SEQ ID NO: 28067 - protein, 10 aa, synthetic construct
FNNKEYLAWY

SEQ ID NO: 28068 - protein, 9 aa, synthetic construct
KEYLAWYQQ

SEQ ID NO: 28069 - protein, 9 aa, synthetic construct
LTISRLQPE

SEQ ID NO: 28070 - protein, 10 aa, synthetic construct
SQTLLYKFNN

SEQ ID NO: 28071 - protein, 10 aa, synthetic construct
NNKEYLAWYQ

SEQ ID NO: 28072 - protein, 10 aa, synthetic construct
EDVAIYYCQQ

SEQ ID NO: 28073 - protein, 10 aa, synthetic construct
FAFGQGTKVE

SEQ ID NO: 28074 - protein, 10 aa, synthetic construct
YCQQYFTTPF

SEQ ID NO: 28075 - protein, 9 aa, synthetic construct
SQTLLYKFN

SEQ ID NO: 28076 - protein, 10 aa, synthetic construct
SSQTLLYKFN

SEQ ID NO: 28077 - protein, 10 aa, synthetic construct
LMYWASTRES

SEQ ID NO: 28078 - protein, 9 aa, synthetic construct
GQPPKLLMY

SEQ ID NO: 28079 - protein, 10 aa, synthetic construct
TDFTLTISRL

SEQ ID NO: 28080 - protein, 9 aa, synthetic construct
NNKEYLAWY

SEQ ID NO: 28081 - protein, 9 aa, synthetic construct
INCKSSQTL

SEQ ID NO: 28082 - protein, 10 aa, synthetic construct
QQYFTTPFAF

SEQ ID NO: 28083 - protein, 10 aa, synthetic construct
LLMYWASTRE

SEQ ID NO: 28084 - protein, 9 aa, synthetic construct
FGQGTKVEI

SEQ ID NO: 28085 - protein, 10 aa, synthetic construct
RLQPEDVAIY

SEQ ID NO: 28086 - protein, 10 aa, synthetic construct
SRLQPEDVAI

SEQ ID NO: 28087 - protein, 10 aa, synthetic construct
AIYYCQQYFT

SEQ ID NO: 28088 - protein, 9 aa, synthetic construct
TLTISRLQP

SEQ ID NO: 28089 - protein, 9 aa, synthetic construct
PKLLMYWAS

SEQ ID NO: 28090 - protein, 9 aa, synthetic construct
SRLQPEDVA

SEQ ID NO: 28091 - protein, 10 aa, synthetic construct
MYWASTRESG

SEQ ID NO: 28092 - protein, 9 aa, synthetic construct
FTTPFAFGQ

SEQ ID NO: 28093 - protein, 9 aa, synthetic construct
PGQPPKLLM

SEQ ID NO: 28094 - protein, 10 aa, synthetic construct
TPFAFGQGTK

SEQ ID NO: 28095 - protein, 10 aa, synthetic construct
IYYCQQYFTT

SEQ ID NO: 28096 - protein, 10 aa, synthetic construct
FGQGTKVEIK

SEQ ID NO: 28097 - protein, 10 aa, synthetic construct
PEDVAIYYCQ

SEQ ID NO: 28098 - protein, 10 aa, synthetic construct
DVAIYYCQQY

SEQ ID NO: 28099 - protein, 10 aa, synthetic construct
PGQPPKLLMY

SEQ ID NO: 28100 - protein, 10 aa, synthetic construct
LYKFNNKEYL

SEQ ID NO: 28101 - protein, 10 aa, synthetic construct
KPGQPPKLLM

SEQ ID NO: 28102 - protein, 10 aa, synthetic construct
CKSSQTLLYK

SEQ ID NO: 28103 - protein, 10 aa, synthetic construct
QTLLYKFNNK

SEQ ID NO: 28104 - protein, 9 aa, synthetic construct
NCKSSQTLL

SEQ ID NO: 28105 - protein, 9 aa, synthetic construct
SSQTLLYKF

SEQ ID NO: 28106 - protein, 10 aa, synthetic construct
KFNNKEYLAW

SEQ ID NO: 28107 - protein, 9 aa, synthetic construct
CKSSQTLLY

SEQ ID NO: 28108 - protein, 9 aa, synthetic construct
LLYKFNNKE

SEQ ID NO: 28109 - protein, 9 aa, synthetic construct
EDVAIYYCQ

SEQ ID NO: 28110 - protein, 10 aa, synthetic construct
TLTISRLQPE

SEQ ID NO: 28111 - protein, 9 aa, synthetic construct
LLMYWASTR

SEQ ID NO: 28112 - protein, 9 aa, synthetic construct
MYWASTRES

SEQ ID NO: 28113 - protein, 10 aa, synthetic construct
CQQYFTTPFA

SEQ ID NO: 28114 - protein, 9 aa, synthetic construct
TLLYKFNNK

SEQ ID NO: 28115 - protein, 10 aa, synthetic construct
TINCKSSQTL

SEQ ID NO: 28116 - protein, 9 aa, synthetic construct
CQQYFTTPF

SEQ ID NO: 28117 - protein, 10 aa, synthetic construct
QPEDVAIYYC

SEQ ID NO: 28118 - protein, 9 aa, synthetic construct
YYCQQYFTT

SEQ ID NO: 28119 - protein, 9 aa, synthetic construct
TDFTLTISR

SEQ ID NO: 28120 - protein, 9 aa, synthetic construct
LYKFNNKEY

SEQ ID NO: 28121 - protein, 10 aa, synthetic construct
NKEYLAWYQQ

SEQ ID NO: 28122 - protein, 10 aa, synthetic construct
DFTLTISRLQ

SEQ ID NO: 28123 - protein, 9 aa, synthetic construct
QYFTTPFAF

SEQ ID NO: 28124 - protein, 10 aa, synthetic construct
FTTPFAFGQG

SEQ ID NO: 28125 - protein, 9 aa, synthetic construct
YCQQYFTTP

SEQ ID NO: 28126 - protein, 10 aa, synthetic construct
KLLMYWASTR

SEQ ID NO: 28127 - protein, 9 aa, synthetic construct
FTLTISRLQ

SEQ ID NO: 28128 - protein, 10 aa, synthetic construct
LTISRLQPED

SEQ ID NO: 28129 - protein, 10 aa, synthetic construct
AFGQGTKVEI

SEQ ID NO: 28130 - protein, 9 aa, synthetic construct
YFTTPFAFG

SEQ ID NO: 28131 - protein, 9 aa, synthetic construct
RLQPEDVAI

SEQ ID NO: 28132 - protein, 9 aa, synthetic construct
KFNNKEYLA

SEQ ID NO: 28133 - protein, 9 aa, synthetic construct
QQYFTTPFA

SEQ ID NO: 28134 - protein, 10 aa, synthetic construct
LQPEDVAIYY

SEQ ID NO: 28135 - protein, 9 aa, synthetic construct
TTPFAFGQG

SEQ ID NO: 28136 - protein, 9 aa, synthetic construct
DFTLTISRL

SEQ ID NO: 28137 - protein, 9 aa, synthetic construct
QPPKLLMYW

SEQ ID NO: 28138 - protein, 9 aa, synthetic construct
LMYWASTRE

SEQ ID NO: 28139 - protein, 9 aa, synthetic construct
AIYYCQQYF

SEQ ID NO: 28140 - protein, 9 aa, synthetic construct
FAFGQGTKV

SEQ ID NO: 28141 - protein, 9 aa, synthetic construct
KLLMYWAST

SEQ ID NO: 28142 - protein, 10 aa, synthetic construct
NCKSSQTLLY

SEQ ID NO: 28143 - protein, 9 aa, synthetic construct
PFAFGQGTK

SEQ ID NO: 28144 - protein, 10 aa, synthetic construct
TTPFAFGQGT

SEQ ID NO: 28145 - protein, 10 aa, synthetic construct
PFAFGQGTKV

SEQ ID NO: 28146 - protein, 10 aa, synthetic construct
PPKLLMYWAS

SEQ ID NO: 28147 - protein, 10 aa, synthetic construct
LLYKFNNKEY

SEQ ID NO: 28148 - protein, 9 aa, synthetic construct
LQPEDVAIY

SEQ ID NO: 28149 - protein, 10 aa, synthetic construct
QYFTTPFAFG

SEQ ID NO: 28150 - protein, 9 aa, synthetic construct
KSSQTLLYK

SEQ ID NO: 28151 - protein, 10 aa, synthetic construct
YFTTPFAFGQ

SEQ ID NO: 28152 - protein, 9 aa, synthetic construct
NKEYLAWYQ

SEQ ID NO: 28153 - protein, 10 aa, synthetic construct
GTDFTLTISR

SEQ ID NO: 28154 - protein, 10 aa, synthetic construct
TISRLQPEDV

SEQ ID NO: 28155 - protein, 9 aa, synthetic construct
ISRLQPEDV

SEQ ID NO: 28156 - protein, 10 aa, synthetic construct
VAIYYCQQYF

SEQ ID NO: 28157 - protein, 10 aa, synthetic construct
EYLAWYQQKP

SEQ ID NO: 28158 - protein, 9 aa, synthetic construct
LNVVVFGGG

SEQ ID NO: 28159 - protein, 10 aa, synthetic construct
SCSGSRSNIG

SEQ ID NO: 28160 - protein, 9 aa, synthetic construct
NWYQHLPGT

SEQ ID NO: 28161 - protein, 10 aa, synthetic construct
VNWYQHLPGT

SEQ ID NO: 28162 - protein, 9 aa, synthetic construct
SVSGTPGQR

SEQ ID NO: 28163 - protein, 10 aa, synthetic construct
SEDDADFYCA

SEQ ID NO: 28164 - protein, 10 aa, synthetic construct
NTVNWYQHLP

SEQ ID NO: 28165 - protein, 10 aa, synthetic construct
SASLAISGLH

SEQ ID NO: 28166 - protein, 9 aa, synthetic construct
ADFYCAAWD

SEQ ID NO: 28167 - protein, 10 aa, synthetic construct
PKLLLYSTYQ

SEQ ID NO: 28168 - protein, 10 aa, synthetic construct
TVNWYQHLPG

SEQ ID NO: 28169 - protein, 10 aa, synthetic construct
VTISCSGSRS

SEQ ID NO: 28170 - protein, 9 aa, synthetic construct
DDADFYCAA

SEQ ID NO: 28171 - protein, 10 aa, synthetic construct
PSVSGTPGQR

SEQ ID NO: 28172 - protein, 9 aa, synthetic construct
SGLHSEDDA

SEQ ID NO: 28173 - protein, 10 aa, synthetic construct
GTAPKLLLYS

SEQ ID NO: 28174 - protein, 9 aa, synthetic construct
CSGSRSNIG

SEQ ID NO: 28175 - protein, 10 aa, synthetic construct
LNVVVFGGGT

SEQ ID NO: 28176 - protein, 9 aa, synthetic construct
PKLLLYSTY

SEQ ID NO: 28177 - protein, 10 aa, synthetic construct
DDADFYCAAW

SEQ ID NO: 28178 - protein, 10 aa, synthetic construct
CSGSRSNIGS

SEQ ID NO: 28179 - protein, 10 aa, synthetic construct
RSNIGSNTVN

SEQ ID NO: 28180 - protein, 10 aa, synthetic construct
HSEDDADFYC

SEQ ID NO: 28181 - protein, 10 aa, synthetic construct
ISGLHSEDDA

SEQ ID NO: 28182 - protein, 10 aa, synthetic construct
VSGTPGQRVT

SEQ ID NO: 28183 - protein, 10 aa, synthetic construct
AISGLHSEDD

SEQ ID NO: 28184 - protein, 9 aa, synthetic construct
AWDDSLNVV

SEQ ID NO: 28185 - protein, 9 aa, synthetic construct
VLTQPPSVS

SEQ ID NO: 28186 - protein, 10 aa, synthetic construct
TISCSGSRSN

SEQ ID NO: 28187 - protein, 9 aa, synthetic construct
GTAPKLLLY

SEQ ID NO: 28188 - protein, 9 aa, synthetic construct
AAWDDSLNV

SEQ ID NO: 28189 - protein, 10 aa, synthetic construct
QHLPGTAPKL

SEQ ID NO: 28190 - protein, 9 aa, synthetic construct
QPPSVSGTP

SEQ ID NO: 28191 - protein, 10 aa, synthetic construct
SGSRSNIGSN

SEQ ID NO: 28192 - protein, 10 aa, synthetic construct
EDDADFYCAA

SEQ ID NO: 28193 - protein, 9 aa, synthetic construct
FYCAAWDDS

SEQ ID NO: 28194 - protein, 10 aa, synthetic construct
PGTAPKLLLY

SEQ ID NO: 28195 - protein, 9 aa, synthetic construct
ISGLHSEDD

SEQ ID NO: 28196 - protein, 10 aa, synthetic construct
DSLNVVVFGG

SEQ ID NO: 28197 - protein, 9 aa, synthetic construct
YQRPSGVPD

SEQ ID NO: 28198 - protein, 9 aa, synthetic construct
APKLLLYST

SEQ ID NO: 28199 - protein, 10 aa, synthetic construct
SLNVVVFGGG

SEQ ID NO: 28200 - protein, 10 aa, synthetic construct
KLLLYSTYQR

SEQ ID NO: 28201 - protein, 9 aa, synthetic construct
HSEDDADFY

SEQ ID NO: 28202 - protein, 9 aa, synthetic construct
WYQHLPGTA

SEQ ID NO: 28203 - protein, 10 aa, synthetic construct
LLYSTYQRPS

SEQ ID NO: 28204 - protein, 9 aa, synthetic construct
HLPGTAPKL

SEQ ID NO: 28205 - protein, 10 aa, synthetic construct
VVVFGGGTKL

SEQ ID NO: 28206 - protein, 10 aa, synthetic construct
SVLTQPPSVS

SEQ ID NO: 28207 - protein, 9 aa, synthetic construct
VVFGGGTKL

SEQ ID NO: 28208 - protein, 9 aa, synthetic construct
DSLNVVVFG

SEQ ID NO: 28209 - protein, 9 aa, synthetic construct
GLHSEDDAD

SEQ ID NO: 28210 - protein, 10 aa, synthetic construct
NVVVFGGGTK

SEQ ID NO: 28211 - protein, 10 aa, synthetic construct
DFYCAAWDDS

SEQ ID NO: 28212 - protein, 9 aa, synthetic construct
TQPPSVSGT

SEQ ID NO: 28213 - protein, 9 aa, synthetic construct
SRSNIGSNT

SEQ ID NO: 28214 - protein, 10 aa, synthetic construct
LYSTYQRPSG

SEQ ID NO: 28215 - protein, 10 aa, synthetic construct
ASLAISGLHS

SEQ ID NO: 28216 - protein, 10 aa, synthetic construct
GSRSNIGSNT

SEQ ID NO: 28217 - protein, 9 aa, synthetic construct
RSNIGSNTV

SEQ ID NO: 28218 - protein, 9 aa, synthetic construct
WDDSLNVVV

SEQ ID NO: 28219 - protein, 9 aa, synthetic construct
ASLAISGLH

SEQ ID NO: 28220 - protein, 9 aa, synthetic construct
NVVVFGGGT

SEQ ID NO: 28221 - protein, 10 aa, synthetic construct
AWDDSLNVVV

SEQ ID NO: 28222 - protein, 9 aa, synthetic construct
SVLTQPPSV

SEQ ID NO: 28223 - protein, 9 aa, synthetic construct
PGTAPKLLL

SEQ ID NO: 28224 - protein, 9 aa, synthetic construct
LLLYSTYQR

SEQ ID NO: 28225 - protein, 9 aa, synthetic construct
SLAISGLHS

SEQ ID NO: 28226 - protein, 10 aa, synthetic construct
NWYQHLPGTA

SEQ ID NO: 28227 - protein, 10 aa, synthetic construct
QSVLTQPPSV

SEQ ID NO: 28228 - protein, 9 aa, synthetic construct
TAPKLLLYS

SEQ ID NO: 28229 - protein, 9 aa, synthetic construct
SGSRSNIGS

SEQ ID NO: 28230 - protein, 10 aa, synthetic construct
ISCSGSRSNI

SEQ ID NO: 28231 - protein, 9 aa, synthetic construct
VNWYQHLPG

SEQ ID NO: 28232 - protein, 10 aa, synthetic construct
TAPKLLLYST

SEQ ID NO: 28233 - protein, 9 aa, synthetic construct
VVVFGGGTK

SEQ ID NO: 28234 - protein, 10 aa, synthetic construct
TYQRPSGVPD

SEQ ID NO: 28235 - protein, 9 aa, synthetic construct
PSVSGTPGQ

SEQ ID NO: 28236 - protein, 10 aa, synthetic construct
SRSNIGSNTV

SEQ ID NO: 28237 - protein, 10 aa, synthetic construct
VLTQPPSVSG

SEQ ID NO: 28238 - protein, 9 aa, synthetic construct
LYSTYQRPS

SEQ ID NO: 28239 - protein, 9 aa, synthetic construct
QHLPGTAPK

SEQ ID NO: 28240 - protein, 10 aa, synthetic construct
HLPGTAPKLL

SEQ ID NO: 28241 - protein, 9 aa, synthetic construct
PPSVSGTPG

SEQ ID NO: 28242 - protein, 9 aa, synthetic construct
SLNVVVFGG

SEQ ID NO: 28243 - protein, 10 aa, synthetic construct
YSTYQRPSGV

SEQ ID NO: 28244 - protein, 10 aa, synthetic construct
LHSEDDADFY

SEQ ID NO: 28245 - protein, 9 aa, synthetic construct
NTVNWYQHL

SEQ ID NO: 28246 - protein, 9 aa, synthetic construct
YSTYQRPSG

SEQ ID NO: 28247 - protein, 10 aa, synthetic construct
APKLLLYSTY

SEQ ID NO: 28248 - protein, 10 aa, synthetic construct
LLLYSTYQRP

SEQ ID NO: 28249 - protein, 9 aa, synthetic construct
VSGTPGQRV

SEQ ID NO: 28250 - protein, 9 aa, synthetic construct
SCSGSRSNI

SEQ ID NO: 28251 - protein, 10 aa, synthetic construct
STYQRPSGVP

SEQ ID NO: 28252 - protein, 10 aa, synthetic construct
CAAWDDSLNV

SEQ ID NO: 28253 - protein, 9 aa, synthetic construct
LHSEDDADF

SEQ ID NO: 28254 - protein, 9 aa, synthetic construct
YQHLPGTAP

SEQ ID NO: 28255 - protein, 10 aa, synthetic construct
RVTISCSGSR

SEQ ID NO: 28256 - protein, 10 aa, synthetic construct
FYCAAWDDSL

SEQ ID NO: 28257 - protein, 9 aa, synthetic construct
SEDDADFYC

SEQ ID NO: 28258 - protein, 10 aa, synthetic construct
SVSGTPGQRV

SEQ ID NO: 28259 - protein, 9 aa, synthetic construct
DDSLNVVVF

SEQ ID NO: 28260 - protein, 9 aa, synthetic construct
STYQRPSGV

SEQ ID NO: 28261 - protein, 10 aa, synthetic construct
VVFGGGTKLT

SEQ ID NO: 28262 - protein, 10 aa, synthetic construct
QPPSVSGTPG

SEQ ID NO: 28263 - protein, 9 aa, synthetic construct
LTQPPSVSG

SEQ ID NO: 28264 - protein, 10 aa, synthetic construct
GSNTVNWYQH

SEQ ID NO: 28265 - protein, 10 aa, synthetic construct
DDSLNVVVFG

SEQ ID NO: 28266 - protein, 9 aa, synthetic construct
GSRSNIGSN

SEQ ID NO: 28267 - protein, 9 aa, synthetic construct
TYQRPSGVP

SEQ ID NO: 28268 - protein, 10 aa, synthetic construct
SLAISGLHSE

SEQ ID NO: 28269 - protein, 10 aa, synthetic construct
YQRPSGVPDR

SEQ ID NO: 28270 - protein, 10 aa, synthetic construct
SGLHSEDDAD

SEQ ID NO: 28271 - protein, 10 aa, synthetic construct
WYQHLPGTAP

SEQ ID NO: 28272 - protein, 10 aa, synthetic construct
LTQPPSVSGT

SEQ ID NO: 28273 - protein, 9 aa, synthetic construct
DADFYCAAW

SEQ ID NO: 28274 - protein, 10 aa, synthetic construct
SNTVNWYQHL

SEQ ID NO: 28275 - protein, 10 aa, synthetic construct
DADFYCAAWD

SEQ ID NO: 28276 - protein, 9 aa, synthetic construct
SNTVNWYQH

SEQ ID NO: 28277 - protein, 9 aa, synthetic construct
ISCSGSRSN

SEQ ID NO: 28278 - protein, 10 aa, synthetic construct
LAISGLHSED

SEQ ID NO: 28279 - protein, 9 aa, synthetic construct
LAISGLHSE

SEQ ID NO: 28280 - protein, 9 aa, synthetic construct
EDDADFYCA

SEQ ID NO: 28281 - protein, 10 aa, synthetic construct
LPGTAPKLLL

SEQ ID NO: 28282 - protein, 9 aa, synthetic construct
AISGLHSED

SEQ ID NO: 28283 - protein, 10 aa, synthetic construct
PPSVSGTPGQ

SEQ ID NO: 28284 - protein, 10 aa, synthetic construct
ADFYCAAWDD

SEQ ID NO: 28285 - protein, 10 aa, synthetic construct
GLHSEDDADF

SEQ ID NO: 28286 - protein, 9 aa, synthetic construct
TVNWYQHLP

SEQ ID NO: 28287 - protein, 10 aa, synthetic construct
WDDSLNVVVF

SEQ ID NO: 28288 - protein, 10 aa, synthetic construct
AAWDDSLNVV

SEQ ID NO: 28289 - protein, 10 aa, synthetic construct
YQHLPGTAPK

SEQ ID NO: 28290 - protein, 9 aa, synthetic construct
VTISCSGSR

SEQ ID NO: 28291 - protein, 9 aa, synthetic construct
TISCSGSRS

SEQ ID NO: 28292 - protein, 10 aa, synthetic construct
TQPPSVSGTP

SEQ ID NO: 28293 - protein, 9 aa, synthetic construct
LLYSTYQRP

SEQ ID NO: 28294 - protein, 9 aa, synthetic construct
DFYCAAWDD

SEQ ID NO: 28295 - protein, 9 aa, synthetic construct
KLLLYSTYQ

SEQ ID NO: 28296 - protein, 9 aa, synthetic construct
YQQQPGKAP

SEQ ID NO: 28297 - protein, 10 aa, synthetic construct
AWYQQQPGKA

SEQ ID NO: 28298 - protein, 10 aa, synthetic construct
TQSPSSVAAS

SEQ ID NO: 28299 - protein, 9 aa, synthetic construct
FPLSFGGGT

SEQ ID NO: 28300 - protein, 9 aa, synthetic construct
GSGTYFTLT

SEQ ID NO: 28301 - protein, 10 aa, synthetic construct
AASTLQSGVP

SEQ ID NO: 28302 - protein, 9 aa, synthetic construct
GSDFATYYC

SEQ ID NO: 28303 - protein, 10 aa, synthetic construct
QQPGKAPRLL

SEQ ID NO: 28304 - protein, 10 aa, synthetic construct
LTQSPSSVAA

SEQ ID NO: 28305 - protein, 10 aa, synthetic construct
PRLLIYAAST

SEQ ID NO: 28306 - protein, 10 aa, synthetic construct
TYYCQQAYRF

SEQ ID NO: 28307 - protein, 10 aa, synthetic construct
LSFGGGTKVD

SEQ ID NO: 28308 - protein, 9 aa, synthetic construct
SPSSVAASI

SEQ ID NO: 28309 - protein, 9 aa, synthetic construct
QGSDFATYY

SEQ ID NO: 28310 - protein, 10 aa, synthetic construct
PSSVAASIGD

SEQ ID NO: 28311 - protein, 9 aa, synthetic construct
AYRFPLSFG

SEQ ID NO: 28312 - protein, 10 aa, synthetic construct
QSPSSVAASI

SEQ ID NO: 28313 - protein, 10 aa, synthetic construct
FPLSFGGGTK

SEQ ID NO: 28314 - protein, 9 aa, synthetic construct
YCQQAYRFP

SEQ ID NO: 28315 - protein, 10 aa, synthetic construct
AYRFPLSFGG

SEQ ID NO: 28316 - protein, 9 aa, synthetic construct
TLTISSLQG

SEQ ID NO: 28317 - protein, 9 aa, synthetic construct
INNWLAWYQ

SEQ ID NO: 28318 - protein, 9 aa, synthetic construct
APRLLIYAA

SEQ ID NO: 28319 - protein, 10 aa, synthetic construct
NWLAWYQQQP

SEQ ID NO: 28320 - protein, 10 aa, synthetic construct
GKAPRLLIYA

SEQ ID NO: 28321 - protein, 9 aa, synthetic construct
SGSGTYFTL

SEQ ID NO: 28322 - protein, 9 aa, synthetic construct
IYAASTLQS

SEQ ID NO: 28323 - protein, 10 aa, synthetic construct
ASIGDRVTIT

SEQ ID NO: 28324 - protein, 10 aa, synthetic construct
IGDRVTITCR

SEQ ID NO: 28325 - protein, 10 aa, synthetic construct
QQQPGKAPRL

SEQ ID NO: 28326 - protein, 10 aa, synthetic construct
TISSLQGSDF

SEQ ID NO: 28327 - protein, 9 aa, synthetic construct
SSLQGSDFA

SEQ ID NO: 28328 - protein, 10 aa, synthetic construct
TITCRASQDI

SEQ ID NO: 28329 - protein, 9 aa, synthetic construct
ASQDINNWL

SEQ ID NO: 28330 - protein, 9 aa, synthetic construct
ITCRASQDI

SEQ ID NO: 28331 - protein, 9 aa, synthetic construct
TCRASQDIN

SEQ ID NO: 28332 - protein, 9 aa, synthetic construct
AWYQQQPGK

SEQ ID NO: 28333 - protein, 9 aa, synthetic construct
QQQPGKAPR

SEQ ID NO: 28334 - protein, 9 aa, synthetic construct
SGSGSGTYF

SEQ ID NO: 28335 - protein, 9 aa, synthetic construct
SVAASIGDR

SEQ ID NO: 28336 - protein, 9 aa, synthetic construct
RFPLSFGGG

SEQ ID NO: 28337 - protein, 10 aa, synthetic construct
SSVAASIGDR

SEQ ID NO: 28338 - protein, 9 aa, synthetic construct
YFTLTISSL

SEQ ID NO: 28339 - protein, 9 aa, synthetic construct
ISSLQGSDF

SEQ ID NO: 28340 - protein, 10 aa, synthetic construct
SDFATYYCQQ

SEQ ID NO: 28341 - protein, 9 aa, synthetic construct
NWLAWYQQQ

SEQ ID NO: 28342 - protein, 10 aa, synthetic construct
LLIYAASTLQ

SEQ ID NO: 28343 - protein, 9 aa, synthetic construct
TYYCQQAYR

SEQ ID NO: 28344 - protein, 10 aa, synthetic construct
ASQDINNWLA

SEQ ID NO: 28345 - protein, 9 aa, synthetic construct
IRLTQSPSS

SEQ ID NO: 28346 - protein, 9 aa, synthetic construct
SSVAASIGD

SEQ ID NO: 28347 - protein, 9 aa, synthetic construct
FSGSGSGTY

SEQ ID NO: 28348 - protein, 9 aa, synthetic construct
LSFGGGTKV

SEQ ID NO: 28349 - protein, 9 aa, synthetic construct
LTQSPSSVA

SEQ ID NO: 28350 - protein, 10 aa, synthetic construct
FSGSGSGTYF

SEQ ID NO: 28351 - protein, 9 aa, synthetic construct
PSSVAASIG

SEQ ID NO: 28352 - protein, 10 aa, synthetic construct
DIRLTQSPSS

SEQ ID NO: 28353 - protein, 10 aa, synthetic construct
YAASTLQSGV

SEQ ID NO: 28354 - protein, 10 aa, synthetic construct
ATYYCQQAYR

SEQ ID NO: 28355 - protein, 9 aa, synthetic construct
LIYAASTLQ

SEQ ID NO: 28356 - protein, 10 aa, synthetic construct
RFPLSFGGGT

SEQ ID NO: 28357 - protein, 10 aa, synthetic construct
DINNWLAWYQ

SEQ ID NO: 28358 - protein, 9 aa, synthetic construct
PRLLIYAAS

SEQ ID NO: 28359 - protein, 10 aa, synthetic construct
SIGDRVTITC

SEQ ID NO: 28360 - protein, 10 aa, synthetic construct
CQQAYRFPLS

SEQ ID NO: 28361 - protein, 9 aa, synthetic construct
ATYYCQQAY

SEQ ID NO: 28362 - protein, 9 aa, synthetic construct
RASQDINNW

SEQ ID NO: 28363 - protein, 9 aa, synthetic construct
NNWLAWYQQ

SEQ ID NO: 28364 - protein, 10 aa, synthetic construct
SFGGGTKVDI

SEQ ID NO: 28365 - protein, 10 aa, synthetic construct
PLSFGGGTKV

SEQ ID NO: 28366 - protein, 9 aa, synthetic construct
LAWYQQQPG

SEQ ID NO: 28367 - protein, 10 aa, synthetic construct
RLLIYAASTL

SEQ ID NO: 28368 - protein, 10 aa, synthetic construct
LIYAASTLQS

SEQ ID NO: 28369 - protein, 10 aa, synthetic construct
YYCQQAYRFP

SEQ ID NO: 28370 - protein, 10 aa, synthetic construct
RASQDINNWL

SEQ ID NO: 28371 - protein, 9 aa, synthetic construct
SDFATYYCQ

SEQ ID NO: 28372 - protein, 10 aa, synthetic construct
NNWLAWYQQQ

SEQ ID NO: 28373 - protein, 9 aa, synthetic construct
ASIGDRVTI

SEQ ID NO: 28374 - protein, 9 aa, synthetic construct
LTISSLQGS

SEQ ID NO: 28375 - protein, 10 aa, synthetic construct
SPSSVAASIG

SEQ ID NO: 28376 - protein, 10 aa, synthetic construct
TYFTLTISSL

SEQ ID NO: 28377 - protein, 10 aa, synthetic construct
QPGKAPRLLI

SEQ ID NO: 28378 - protein, 10 aa, synthetic construct
PGKAPRLLIY

SEQ ID NO: 28379 - protein, 9 aa, synthetic construct
AASIGDRVT

SEQ ID NO: 28380 - protein, 10 aa, synthetic construct
TCRASQDINN

SEQ ID NO: 28381 - protein, 10 aa, synthetic construct
GTYFTLTISS

SEQ ID NO: 28382 - protein, 10 aa, synthetic construct
ITCRASQDIN

SEQ ID NO: 28383 - protein, 9 aa, synthetic construct
SQDINNWLA

SEQ ID NO: 28384 - protein, 10 aa, synthetic construct
KAPRLLIYAA

SEQ ID NO: 28385 - protein, 9 aa, synthetic construct
TITCRASQD

SEQ ID NO: 28386 - protein, 10 aa, synthetic construct
APRLLIYAAS

SEQ ID NO: 28387 - protein, 10 aa, synthetic construct
LQGSDFATYY

SEQ ID NO: 28388 - protein, 10 aa, synthetic construct
QQAYRFPLSF

SEQ ID NO: 28389 - protein, 10 aa, synthetic construct
RLTQSPSSVA

SEQ ID NO: 28390 - protein, 9 aa, synthetic construct
SFGGGTKVD

SEQ ID NO: 28391 - protein, 9 aa, synthetic construct
RLTQSPSSV

SEQ ID NO: 28392 - protein, 10 aa, synthetic construct
CRASQDINNW

SEQ ID NO: 28393 - protein, 10 aa, synthetic construct
INNWLAWYQQ

SEQ ID NO: 28394 - protein, 9 aa, synthetic construct
DINNWLAWY

SEQ ID NO: 28395 - protein, 10 aa, synthetic construct
SGTYFTLTIS

SEQ ID NO: 28396 - protein, 10 aa, synthetic construct
AASIGDRVTI

SEQ ID NO: 28397 - protein, 10 aa, synthetic construct
QAYRFPLSFG

SEQ ID NO: 28398 - protein, 10 aa, synthetic construct
YRFPLSFGGG

SEQ ID NO: 28399 - protein, 10 aa, synthetic construct
ISSLQGSDFA

SEQ ID NO: 28400 - protein, 9 aa, synthetic construct
YYCQQAYRF

SEQ ID NO: 28401 - protein, 10 aa, synthetic construct
SVAASIGDRV

SEQ ID NO: 28402 - protein, 9 aa, synthetic construct
TQSPSSVAA

SEQ ID NO: 28403 - protein, 10 aa, synthetic construct
GSGSGTYFTL

SEQ ID NO: 28404 - protein, 10 aa, synthetic construct
SGSGTYFTLT

SEQ ID NO: 28405 - protein, 9 aa, synthetic construct
TYFTLTISS

SEQ ID NO: 28406 - protein, 10 aa, synthetic construct
RFSGSGSGTY

SEQ ID NO: 28407 - protein, 10 aa, synthetic construct
QGSDFATYYC

SEQ ID NO: 28408 - protein, 10 aa, synthetic construct
VAASIGDRVT

SEQ ID NO: 28409 - protein, 10 aa, synthetic construct
LTISSLQGSD

SEQ ID NO: 28410 - protein, 9 aa, synthetic construct
QDINNWLAW

SEQ ID NO: 28411 - protein, 9 aa, synthetic construct
QPGKAPRLL

SEQ ID NO: 28412 - protein, 9 aa, synthetic construct
QQPGKAPRL

SEQ ID NO: 28413 - protein, 9 aa, synthetic construct
PGKAPRLLI

SEQ ID NO: 28414 - protein, 10 aa, synthetic construct
GSGTYFTLTI

SEQ ID NO: 28415 - protein, 10 aa, synthetic construct
IYAASTLQSG

SEQ ID NO: 28416 - protein, 10 aa, synthetic construct
QDINNWLAWY

SEQ ID NO: 28417 - protein, 10 aa, synthetic construct
SGSGSGTYFT

SEQ ID NO: 28418 - protein, 9 aa, synthetic construct
GTYFTLTIS

SEQ ID NO: 28419 - protein, 9 aa, synthetic construct
RLLIYAAST

SEQ ID NO: 28420 - protein, 9 aa, synthetic construct
SIGDRVTIT

SEQ ID NO: 28421 - protein, 9 aa, synthetic construct
KAPRLLIYA

SEQ ID NO: 28422 - protein, 10 aa, synthetic construct
WLAWYQQQPG

SEQ ID NO: 28423 - protein, 10 aa, synthetic construct
FATYYCQQAY

SEQ ID NO: 28424 - protein, 9 aa, synthetic construct
YRFPLSFGG

SEQ ID NO: 28425 - protein, 10 aa, synthetic construct
SQDINNWLAW

SEQ ID NO: 28426 - protein, 9 aa, synthetic construct
GKAPRLLIY

SEQ ID NO: 28427 - protein, 9 aa, synthetic construct
CQQAYRFPL

SEQ ID NO: 28428 - protein, 10 aa, synthetic construct
WYQQQPGKAP

SEQ ID NO: 28429 - protein, 10 aa, synthetic construct
YQQQPGKAPR

SEQ ID NO: 28430 - protein, 9 aa, synthetic construct
SGTYFTLTI

SEQ ID NO: 28431 - protein, 10 aa, synthetic construct
YCQQAYRFPL

SEQ ID NO: 28432 - protein, 9 aa, synthetic construct
WYQQQPGKA

SEQ ID NO: 28433 - protein, 9 aa, synthetic construct
VAASIGDRV

SEQ ID NO: 28434 - protein, 10 aa, synthetic construct
IRLTQSPSSV

SEQ ID NO: 28435 - protein, 10 aa, synthetic construct
SLQGSDFATY

SEQ ID NO: 28436 - protein, 9 aa, synthetic construct
PLSFGGGTK

SEQ ID NO: 28437 - protein, 10 aa, synthetic construct
SSLQGSDFAT

SEQ ID NO: 28438 - protein, 9 aa, synthetic construct
DIRLTQSPS

SEQ ID NO: 28439 - protein, 10 aa, synthetic construct
TLTISSLQGS

SEQ ID NO: 28440 - protein, 10 aa, synthetic construct
VTITCRASQD

SEQ ID NO: 28441 - protein, 9 aa, synthetic construct
CRASQDINN

SEQ ID NO: 28442 - protein, 9 aa, synthetic construct
IGDRVTITC

SEQ ID NO: 28443 - protein, 9 aa, synthetic construct
AASTLQSGV

SEQ ID NO: 28444 - protein, 9 aa, synthetic construct
QSPSSVAAS

SEQ ID NO: 28445 - protein, 9 aa, synthetic construct
QQAYRFPLS

SEQ ID NO: 28446 - protein, 10 aa, synthetic construct
GSDFATYYCQ

SEQ ID NO: 28447 - protein, 10 aa, synthetic construct
FTLTISSLQG

SEQ ID NO: 28448 - protein, 9 aa, synthetic construct
SLQGSDFAT

SEQ ID NO: 28449 - protein, 10 aa, synthetic construct
YFTLTISSLQ

SEQ ID NO: 28450 - protein, 9 aa, synthetic construct
QAYRFPLSF

SEQ ID NO: 28451 - protein, 9 aa, synthetic construct
WLAWYQQQP

SEQ ID NO: 28452 - protein, 9 aa, synthetic construct
GSGSGTYFT

SEQ ID NO: 28453 - protein, 9 aa, synthetic construct
YAASTLQSG

SEQ ID NO: 28454 - protein, 9 aa, synthetic construct
LLIYAASTL

SEQ ID NO: 28455 - protein, 10 aa, synthetic construct
LAWYQQQPGK

SEQ ID NO: 28456 - protein, 9 aa, synthetic construct
TISSLQGSD

SEQ ID NO: 28457 - protein, 9 aa, synthetic construct
LQGSDFATY

SEQ ID NO: 28458 - protein, 9 aa, synthetic construct
SCTGPSSDV

SEQ ID NO: 28459 - protein, 9 aa, synthetic construct
LIIYEVTNR

SEQ ID NO: 28460 - protein, 9 aa, synthetic construct
APKLIIYEV

SEQ ID NO: 28461 - protein, 10 aa, synthetic construct
SSYFISRHVV

SEQ ID NO: 28462 - protein, 10 aa, synthetic construct
APKLIIYEVT

SEQ ID NO: 28463 - protein, 9 aa, synthetic construct
TTASLTISG

SEQ ID NO: 28464 - protein, 9 aa, synthetic construct
TNRPSGVSN

SEQ ID NO: 28465 - protein, 10 aa, synthetic construct
QHPGKAPKLI

SEQ ID NO: 28466 - protein, 10 aa, synthetic construct
FSGSKSGTTA

SEQ ID NO: 28467 - protein, 9 aa, synthetic construct
GKAPKLIIY

SEQ ID NO: 28468 - protein, 9 aa, synthetic construct
SRHVVFGGG

SEQ ID NO: 28469 - protein, 9 aa, synthetic construct
GPSSDVAGY

SEQ ID NO: 28470 - protein, 10 aa, synthetic construct
YYCSSYFISR

SEQ ID NO: 28471 - protein, 9 aa, synthetic construct
YNFVSWYQQ

SEQ ID NO: 28472 - protein, 10 aa, synthetic construct
YFISRHVVFG

SEQ ID NO: 28473 - protein, 9 aa, synthetic construct
PGKAPKLII

SEQ ID NO: 28474 - protein, 10 aa, synthetic construct
DVAGYNFVSW

SEQ ID NO: 28475 - protein, 9 aa, synthetic construct
GLQAEDEAE

SEQ ID NO: 28476 - protein, 9 aa, synthetic construct
YEVTNRPSG

SEQ ID NO: 28477 - protein, 9 aa, synthetic construct
HPGKAPKLI

SEQ ID NO: 28478 - protein, 10 aa, synthetic construct
VFGGGTRVTV

SEQ ID NO: 28479 - protein, 10 aa, synthetic construct
TISCTGPSSD

SEQ ID NO: 28480 - protein, 9 aa, synthetic construct
EYYCSSYFI

SEQ ID NO: 28481 - protein, 9 aa, synthetic construct
YFISRHVVF

SEQ ID NO: 28482 - protein, 9 aa, synthetic construct
YCSSYFISR

SEQ ID NO: 28483 - protein, 9 aa, synthetic construct
GTTASLTIS

SEQ ID NO: 28484 - protein, 10 aa, synthetic construct
LQAEDEAEYY

SEQ ID NO: 28485 - protein, 10 aa, synthetic construct
EAEYYCSSYF

SEQ ID NO: 28486 - protein, 10 aa, synthetic construct
LIIYEVTNRP

SEQ ID NO: 28487 - protein, 10 aa, synthetic construct
IIYEVTNRPS

SEQ ID NO: 28488 - protein, 10 aa, synthetic construct
TGPSSDVAGY

SEQ ID NO: 28489 - protein, 9 aa, synthetic construct
TGPSSDVAG

SEQ ID NO: 28490 - protein, 10 aa, synthetic construct
YEVTNRPSGV

SEQ ID NO: 28491 - protein, 9 aa, synthetic construct
ISCTGPSSD

SEQ ID NO: 28492 - protein, 9 aa, synthetic construct
RFSGSKSGT

SEQ ID NO: 28493 - protein, 10 aa, synthetic construct
PGKAPKLIIY

SEQ ID NO: 28494 - protein, 10 aa, synthetic construct
HPGKAPKLII

SEQ ID NO: 28495 - protein, 10 aa, synthetic construct
GLQAEDEAEY

SEQ ID NO: 28496 - protein, 9 aa, synthetic construct
DVAGYNFVS

SEQ ID NO: 28497 - protein, 9 aa, synthetic construct
PSSDVAGYN

SEQ ID NO: 28498 - protein, 10 aa, synthetic construct
KSGTTASLTI

SEQ ID NO: 28499 - protein, 9 aa, synthetic construct
SDVAGYNFV

SEQ ID NO: 28500 - protein, 10 aa, synthetic construct
QAEDEAEYYC

SEQ ID NO: 28501 - protein, 9 aa, synthetic construct
ITISCTGPS

SEQ ID NO: 28502 - protein, 10 aa, synthetic construct
VVFGGGTRVT

SEQ ID NO: 28503 - protein, 10 aa, synthetic construct
CSSYFISRHV

SEQ ID NO: 28504 - protein, 10 aa, synthetic construct
SITISCTGPS

SEQ ID NO: 28505 - protein, 10 aa, synthetic construct
FISRHVVFGG

SEQ ID NO: 28506 - protein, 9 aa, synthetic construct
YYCSSYFIS

SEQ ID NO: 28507 - protein, 10 aa, synthetic construct
SGLQAEDEAE

SEQ ID NO: 28508 - protein, 10 aa, synthetic construct
AGYNFVSWYQ

SEQ ID NO: 28509 - protein, 9 aa, synthetic construct
VAGYNFVSW

SEQ ID NO: 28510 - protein, 9 aa, synthetic construct
FGGGTRVTV

SEQ ID NO: 28511 - protein, 10 aa, synthetic construct
VTNRPSGVSN

SEQ ID NO: 28512 - protein, 10 aa, synthetic construct
GKAPKLIIYE

SEQ ID NO: 28513 - protein, 9 aa, synthetic construct
ISRHVVFGG

SEQ ID NO: 28514 - protein, 10 aa, synthetic construct
RHVVFGGGTR

SEQ ID NO: 28515 - protein, 9 aa, synthetic construct
NFVSWYQQH

SEQ ID NO: 28516 - protein, 10 aa, synthetic construct
EVTNRPSGVS

SEQ ID NO: 28517 - protein, 10 aa, synthetic construct
PKLIIYEVTN

SEQ ID NO: 28518 - protein, 10 aa, synthetic construct
TNRPSGVSNR

SEQ ID NO: 28519 - protein, 9 aa, synthetic construct
KSGTTASLT

SEQ ID NO: 28520 - protein, 10 aa, synthetic construct
YNFVSWYQQH

SEQ ID NO: 28521 - protein, 9 aa, synthetic construct
VFGGGTRVT

SEQ ID NO: 28522 - protein, 10 aa, synthetic construct
QSITISCTGP

SEQ ID NO: 28523 - protein, 9 aa, synthetic construct
SITISCTGP

SEQ ID NO: 28524 - protein, 10 aa, synthetic construct
SSDVAGYNFV

SEQ ID NO: 28525 - protein, 10 aa, synthetic construct
KLIIYEVTNR

SEQ ID NO: 28526 - protein, 10 aa, synthetic construct
EDEAEYYCSS

SEQ ID NO: 28527 - protein, 9 aa, synthetic construct
QAEDEAEYY

SEQ ID NO: 28528 - protein, 9 aa, synthetic construct
SGSKSGTTA

SEQ ID NO: 28529 - protein, 9 aa, synthetic construct
IYEVTNRPS

SEQ ID NO: 28530 - protein, 9 aa, synthetic construct
EAEYYCSSY

SEQ ID NO: 28531 - protein, 10 aa, synthetic construct
PSSDVAGYNF

SEQ ID NO: 28532 - protein, 10 aa, synthetic construct
TTASLTISGL

SEQ ID NO: 28533 - protein, 9 aa, synthetic construct
RHVVFGGGT

SEQ ID NO: 28534 - protein, 10 aa, synthetic construct
NFVSWYQQHP

SEQ ID NO: 28535 - protein, 10 aa, synthetic construct
SKSGTTASLT

SEQ ID NO: 28536 - protein, 10 aa, synthetic construct
SYFISRHVVF

SEQ ID NO: 28537 - protein, 9 aa, synthetic construct
SGTTASLTI

SEQ ID NO: 28538 - protein, 10 aa, synthetic construct
AEDEAEYYCS

SEQ ID NO: 28539 - protein, 10 aa, synthetic construct
SRHVVFGGGT

SEQ ID NO: 28540 - protein, 9 aa, synthetic construct
DEAEYYCSS

SEQ ID NO: 28541 - protein, 9 aa, synthetic construct
EVTNRPSGV

SEQ ID NO: 28542 - protein, 10 aa, synthetic construct
SGSKSGTTAS

SEQ ID NO: 28543 - protein, 10 aa, synthetic construct
EYYCSSYFIS

SEQ ID NO: 28544 - protein, 9 aa, synthetic construct
HVVFGGGTR

SEQ ID NO: 28545 - protein, 9 aa, synthetic construct
VVFGGGTRV

SEQ ID NO: 28546 - protein, 9 aa, synthetic construct
KAPKLIIYE

SEQ ID NO: 28547 - protein, 9 aa, synthetic construct
PKLIIYEVT

SEQ ID NO: 28548 - protein, 9 aa, synthetic construct
KLIIYEVTN

SEQ ID NO: 28549 - protein, 10 aa, synthetic construct
YCSSYFISRH

SEQ ID NO: 28550 - protein, 10 aa, synthetic construct
VAGYNFVSWY

SEQ ID NO: 28551 - protein, 10 aa, synthetic construct
NRFSGSKSGT

SEQ ID NO: 28552 - protein, 9 aa, synthetic construct
LQAEDEAEY

SEQ ID NO: 28553 - protein, 10 aa, synthetic construct
FVSWYQQHPG

SEQ ID NO: 28554 - protein, 9 aa, synthetic construct
GYNFVSWYQ

SEQ ID NO: 28555 - protein, 10 aa, synthetic construct
RFSGSKSGTT

SEQ ID NO: 28556 - protein, 9 aa, synthetic construct
AEDEAEYYC

SEQ ID NO: 28557 - protein, 9 aa, synthetic construct
AEYYCSSYF

SEQ ID NO: 28558 - protein, 9 aa, synthetic construct
SSYFISRHV

SEQ ID NO: 28559 - protein, 9 aa, synthetic construct
CTGPSSDVA

SEQ ID NO: 28560 - protein, 9 aa, synthetic construct
IIYEVTNRP

SEQ ID NO: 28561 - protein, 9 aa, synthetic construct
SKSGTTASL

SEQ ID NO: 28562 - protein, 10 aa, synthetic construct
IYEVTNRPSG

SEQ ID NO: 28563 - protein, 9 aa, synthetic construct
VTNRPSGVS

SEQ ID NO: 28564 - protein, 9 aa, synthetic construct
EDEAEYYCS

SEQ ID NO: 28565 - protein, 10 aa, synthetic construct
GYNFVSWYQQ

SEQ ID NO: 28566 - protein, 10 aa, synthetic construct
AEYYCSSYFI

SEQ ID NO: 28567 - protein, 10 aa, synthetic construct
KAPKLIIYEV

SEQ ID NO: 28568 - protein, 9 aa, synthetic construct
CSSYFISRH

SEQ ID NO: 28569 - protein, 9 aa, synthetic construct
FISRHVVFG

SEQ ID NO: 28570 - protein, 10 aa, synthetic construct
HVVFGGGTRV

SEQ ID NO: 28571 - protein, 10 aa, synthetic construct
GTTASLTISG

SEQ ID NO: 28572 - protein, 10 aa, synthetic construct
CTGPSSDVAG

SEQ ID NO: 28573 - protein, 10 aa, synthetic construct
ITISCTGPSS

SEQ ID NO: 28574 - protein, 9 aa, synthetic construct
GSKSGTTAS

SEQ ID NO: 28575 - protein, 10 aa, synthetic construct
ISRHVVFGGG

SEQ ID NO: 28576 - protein, 9 aa, synthetic construct
FVSWYQQHP

SEQ ID NO: 28577 - protein, 10 aa, synthetic construct
GSKSGTTASL

SEQ ID NO: 28578 - protein, 9 aa, synthetic construct
AGYNFVSWY

SEQ ID NO: 28579 - protein, 9 aa, synthetic construct
FSGSKSGTT

SEQ ID NO: 28580 - protein, 9 aa, synthetic construct
TISCTGPSS

SEQ ID NO: 28581 - protein, 10 aa, synthetic construct
GPSSDVAGYN

SEQ ID NO: 28582 - protein, 10 aa, synthetic construct
DEAEYYCSSY

SEQ ID NO: 28583 - protein, 10 aa, synthetic construct
SCTGPSSDVA

SEQ ID NO: 28584 - protein, 10 aa, synthetic construct
SDVAGYNFVS

SEQ ID NO: 28585 - protein, 9 aa, synthetic construct
SYFISRHVV

SEQ ID NO: 28586 - protein, 10 aa, synthetic construct
FGGGTRVTVL

SEQ ID NO: 28587 - protein, 10 aa, synthetic construct
ISCTGPSSDV

SEQ ID NO: 28588 - protein, 10 aa, synthetic construct
SGTTASLTIS

SEQ ID NO: 28589 - protein, 14 aa, synthetic construct
CALGELSNTDKLIF

SEQ ID NO: 28590 - protein, 11 aa, synthetic construct
CAATNTDKLIF

SEQ ID NO: 28591 - protein, 11 aa, synthetic construct
CAFMRSIDMRF

SEQ ID NO: 28592 - protein, 15 aa, synthetic construct
CAVPRKNSNTGKLIF

SEQ ID NO: 28593 - protein, 15 aa, synthetic construct
CASLLFSGGYNKLIF

SEQ ID NO: 28594 - protein, 13 aa, synthetic construct
CAASPYNFNKFYF

SEQ ID NO: 28595 - protein, 14 aa, synthetic construct
CALSEAGSARQLTF

SEQ ID NO: 28596 - protein, 15 aa, synthetic construct
CLVGDPKAAGNKLTF

SEQ ID NO: 28597 - protein, 13 aa, synthetic construct
CVVKDNAGNMLTF

SEQ ID NO: 28598 - protein, 18 aa, synthetic construct
CAVSDPAISNFGNEKLTF

SEQ ID NO: 28599 - protein, 14 aa, synthetic construct
CAVSERLDGFKTIF

SEQ ID NO: 28600 - protein, 14 aa, synthetic construct
CVVKYSGGYQKVTF

SEQ ID NO: 28601 - protein, 12 aa, synthetic construct
CISGAGSYQLTF

SEQ ID NO: 28602 - protein, 14 aa, synthetic construct
CAVGAGQAGTALIF

SEQ ID NO: 28603 - protein, 12 aa, synthetic construct
CAAIRPIDKLIF

SEQ ID NO: 28604 - protein, 15 aa, synthetic construct
CAVRALGAGSYQLTF

SEQ ID NO: 28605 - protein, 16 aa, synthetic construct
CASRLKREGSYNEQFF

SEQ ID NO: 28606 - protein, 14 aa, synthetic construct
CASSLEGGGYEQFF

SEQ ID NO: 28607 - protein, 14 aa, synthetic construct
CASSFSLAGNEQFF

SEQ ID NO: 28608 - protein, 14 aa, synthetic construct
CASSSPGDPNIQYF

SEQ ID NO: 28609 - protein, 18 aa, synthetic construct
CASSPFPPDRGPYNEQFF

SEQ ID NO: 28610 - protein, 14 aa, synthetic construct
CASSLSPTNYGYTF

SEQ ID NO: 28611 - protein, 14 aa, synthetic construct
CASSFYGSNYEQYF

SEQ ID NO: 28612 - protein, 15 aa, synthetic construct
CASSVEGRGGDTQYF

SEQ ID NO: 28613 - protein, 15 aa, synthetic construct
CASTRTYSSTDTQYF

SEQ ID NO: 28614 - protein, 14 aa, synthetic construct
CASSWLATDPEQFF

SEQ ID NO: 28615 - protein, 17 aa, synthetic construct
CSATLLLAGGPANEQFF

SEQ ID NO: 28616 - protein, 15 aa, synthetic construct
CASSQVAGFPDTQYF

SEQ ID NO: 28617 - protein, 18 aa, synthetic construct
CASSGTSSADRNTGELFF

SEQ ID NO: 28618 - protein, 13 aa, synthetic construct
CSVEAANAYEQYF

SEQ ID NO: 28619 - protein, 14 aa, synthetic construct
CASSEAAVSYGYTF

SEQ ID NO: 28620 - protein, 12 aa, synthetic construct
CASSSPGQPQHF

SEQ ID NO: 28621 - protein, 16 aa, synthetic construct
CASSVASVTSTDTQYF

SEQ ID NO: 28622 - protein, 17 aa, synthetic construct
CASSSPRDRATYNEQFF

SEQ ID NO: 28623 - protein, 12 aa, synthetic construct
CASSSPGQPQHF

SEQ ID NO: 28624 - protein, 10 aa, synthetic construct
ISFSLMLWLS

SEQ ID NO: 28625 - protein, 10 aa, synthetic construct
VLERLLVGAP

SEQ ID NO: 28626 - protein, 10 aa, synthetic construct
MRLPAQLLGL

SEQ ID NO: 28627 - protein, 9 aa, synthetic construct
VFLAERTAQ

SEQ ID NO: 28628 - protein, 9 aa, synthetic construct
VHLLEGMLF

SEQ ID NO: 28629 - protein, 9 aa, synthetic construct
MENFTVATP

SEQ ID NO: 28630 - protein, 10 aa, synthetic construct
LDLMPLEPSK

SEQ ID NO: 28631 - protein, 9 aa, synthetic construct
LPDGSRVEL

SEQ ID NO: 28632 - protein, 9 aa, synthetic construct
RPDSRLLEL

SEQ ID NO: 28633 - protein, 9 aa, synthetic construct
LTLGEFLKL

SEQ ID NO: 28634 - protein, 9 aa, synthetic construct
RIAAWMATY

SEQ ID NO: 28635 - protein, 10 aa, synthetic construct
WLSLKTLLSL

SEQ ID NO: 28636 - protein, 9 aa, synthetic construct
RVRFFFPSL

SEQ ID NO: 28637 - protein, 9 aa, synthetic construct
STPPPGTRV

SEQ ID NO: 28638 - protein, 9 aa, synthetic construct
AYACNTSTL

SEQ ID NO: 28639 - protein, 9 aa, synthetic construct
CYTWNQMNL

SEQ ID NO: 28640 - protein, 10 aa, synthetic construct
RISTFKNWPK

SEQ ID NO: 28641 - protein, 10 aa, synthetic construct
TVSGNILTIR

SEQ ID NO: 28642 - protein, 10 aa, synthetic construct
ALLTSRLRFI

SEQ ID NO: 28643 - protein, 9 aa, synthetic construct
ALSPVPPVV

SEQ ID NO: 28644 - protein, 10 aa, synthetic construct
ALYVDSLFFL

SEQ ID NO: 28645 - protein, 9 aa, synthetic construct
FLAMLKNTV

SEQ ID NO: 28646 - protein, 9 aa, synthetic construct
FLWGPRALV

SEQ ID NO: 28647 - protein, 11 aa, synthetic construct
GLAPPQHLIRV

SEQ ID NO: 28648 - protein, 9 aa, synthetic construct
GLYDGMEHL

SEQ ID NO: 28649 - protein, 10 aa, synthetic construct
GVYDGREHTV

SEQ ID NO: 28650 - protein, 9 aa, synthetic construct
ILAKFLHWL

SEQ ID NO: 28651 - protein, 9 aa, synthetic construct
ILHDGAYSL

SEQ ID NO: 28652 - protein, 9 aa, synthetic construct
KIFGSLAFL

SEQ ID NO: 28653 - protein, 9 aa, synthetic construct
KLCPVQLWV

SEQ ID NO: 28654 - protein, 9 aa, synthetic construct
KVAELVHFL

SEQ ID NO: 28655 - protein, 10 aa, synthetic construct
LIAHNQVRQV

SEQ ID NO: 28656 - protein, 9 aa, synthetic construct
LLGRNSFEV

SEQ ID NO: 28657 - protein, 9 aa, synthetic construct
LMLGEFLKL

SEQ ID NO: 28658 - protein, 9 aa, synthetic construct
RMFPNAPYL

SEQ ID NO: 28659 - protein, 9 aa, synthetic construct
RMPEAAPPV

SEQ ID NO: 28660 - protein, 9 aa, synthetic construct
SLGEQQYSV

SEQ ID NO: 28661 - protein, 9 aa, synthetic construct
SLLMWITQC

SEQ ID NO: 28662 - protein, 9 aa, synthetic construct
SLLMWITQV

SEQ ID NO: 28663 - protein, 9 aa, synthetic construct
SLPPPGTRV

SEQ ID NO: 28664 - protein, 10 aa, synthetic construct
TLPPAWQPFL

SEQ ID NO: 28665 - protein, 9 aa, synthetic construct
VLDFAPPGA

SEQ ID NO: 28666 - protein, 9 aa, synthetic construct
VLDGLDVLL

SEQ ID NO: 28667 - protein, 9 aa, synthetic construct
YLGSYGFRL

SEQ ID NO: 28668 - protein, 10 aa, synthetic construct
YLNDHLEPWI

SEQ ID NO: 28669 - protein, 10 aa, synthetic construct
YLNRHLHTWI

SEQ ID NO: 28670 - protein, 10 aa, synthetic construct
YLQLVFGIEV

SEQ ID NO: 28671 - protein, 10 aa, synthetic construct
YLQVNSLQTV

SEQ ID NO: 28672 - protein, 9 aa, synthetic construct
EADPTGHSY

SEQ ID NO: 28673 - protein, 9 aa, synthetic construct
FTELTLGEF

SEQ ID NO: 28674 - protein, 11 aa, synthetic construct
TSEKRPFMCAY

SEQ ID NO: 28675 - protein, 16 aa, synthetic construct
CASSPLTGTGAYGYTF

SEQ ID NO: 28676 - protein, 15 aa, synthetic construct
CASSSPGQGRYEQYF

SEQ ID NO: 28677 - protein, 13 aa, synthetic construct
CASSDRGNQPQHF

SEQ ID NO: 28678 - protein, 18 aa, synthetic construct
CSARDLGVGDYVYNEQFF

SEQ ID NO: 28679 - protein, 14 aa, synthetic construct
CASSLTSGYNEQFF

SEQ ID NO: 28680 - protein, 15 aa, synthetic construct
CASSVGHRGQETQYF

SEQ ID NO: 28681 - protein, 12 aa, synthetic construct
CSARSGANVLTF

SEQ ID NO: 28682 - protein, 14 aa, synthetic construct
CASSRDSLTDTQYF

SEQ ID NO: 28683 - protein, 13 aa, synthetic construct
CASSFSGGNEQFF

SEQ ID NO: 28684 - protein, 17 aa, synthetic construct
CASSLSALAGSYNEQFF

SEQ ID NO: 28685 - protein, 14 aa, synthetic construct
CASSEDGMNTEAFF

SEQ ID NO: 28686 - protein, 16 aa, synthetic construct
CASSATSRGLNQPQHF

SEQ ID NO: 28687 - protein, 12 aa, synthetic construct
CASSLGARPQHF

SEQ ID NO: 28688 - protein, 12 aa, synthetic construct
CASSFGGREQFF

SEQ ID NO: 28689 - protein, 13 aa, synthetic construct
CASSLGLSYEQYF

SEQ ID NO: 28690 - protein, 13 aa, synthetic construct
CSVEEGGGTEAFF

SEQ ID NO: 28691 - protein, 13 aa, synthetic construct
CATRDSSGNTIYF

SEQ ID NO: 28692 - protein, 13 aa, synthetic construct
CAISGGGNQPQHF

SEQ ID NO: 28693 - protein, 11 aa, synthetic construct
CASSPQETQYF

SEQ ID NO: 28694 - protein, 12 aa, synthetic construct
CASTPGNYGYTF

SEQ ID NO: 28695 - protein, 12 aa, synthetic construct
CASSPDTGELFF

SEQ ID NO: 28696 - protein, 13 aa, synthetic construct
CASSAGLGTEAFF

SEQ ID NO: 28697 - protein, 14 aa, synthetic construct
CASSRGQGSYEQYF

SEQ ID NO: 28698 - protein, 14 aa, synthetic construct
CASSLSGGNQPQHF

SEQ ID NO: 28699 - protein, 15 aa, synthetic construct
CASSLAGGRYNEQFF

SEQ ID NO: 28700 - protein, 13 aa, synthetic construct
CASRRGYNQPQHF

SEQ ID NO: 28701 - protein, 12 aa, synthetic construct
CASSQGGYEQYF

SEQ ID NO: 28702 - protein, 15 aa, synthetic construct
CASSQGDRGNYGYTF

SEQ ID NO: 28703 - protein, 13 aa, synthetic construct
CASSLEAGYGYTF

SEQ ID NO: 28704 - protein, 12 aa, synthetic construct
CASSLLGETQYF

SEQ ID NO: 28705 - protein, 14 aa, synthetic construct
CASSLSTTNEKLFF

SEQ ID NO: 28706 - protein, 13 aa, synthetic construct
CASSPDRTDTQYF

SEQ ID NO: 28707 - protein, 14 aa, synthetic construct
CASSLGQGNYGYTF

SEQ ID NO: 28708 - protein, 10 aa, synthetic construct
CASSLYEQYF

SEQ ID NO: 28709 - protein, 17 aa, synthetic construct
CASTNEGGAGMGEKLFF

SEQ ID NO: 28710 - protein, 15 aa, synthetic construct
CASSQGPSSNTEAFF

SEQ ID NO: 28711 - protein, 12 aa, synthetic construct
CASSLEGEKLFF

SEQ ID NO: 28712 - protein, 13 aa, synthetic construct
CASSRDSNQPQHF

SEQ ID NO: 28713 - protein, 13 aa, synthetic construct
CASSLDRNQPQHF

SEQ ID NO: 28714 - protein, 14 aa, synthetic construct
CASSLQGANYEQYF

SEQ ID NO: 28715 - protein, 14 aa, synthetic construct
CASSLETGPYEQYF

SEQ ID NO: 28716 - protein, 13 aa, synthetic construct
CASSLARGYEQYF

SEQ ID NO: 28717 - protein, 13 aa, synthetic construct
CASSIEVNTEAFF

SEQ ID NO: 28718 - protein, 15 aa, synthetic construct
CASSLEGRGTGELFF

SEQ ID NO: 28719 - protein, 15 aa, synthetic construct
CSARDYLAGAGELFF

SEQ ID NO: 28720 - protein, 11 aa, synthetic construct
CASSEGETQYF

SEQ ID NO: 28721 - protein, 12 aa, synthetic construct
CASSFGGDTQYF

SEQ ID NO: 28722 - protein, 15 aa, synthetic construct
CASSLDGGSNQPQHF

SEQ ID NO: 28723 - protein, 12 aa, synthetic construct
CASTGAGQPQHF

SEQ ID NO: 28724 - protein, 15 aa, synthetic construct
CASSLRSSYNSPLHF

SEQ ID NO: 28725 - protein, 12 aa, synthetic construct
CASSLPGNEQFF

SEQ ID NO: 28726 - protein, 13 aa, synthetic construct
CASSLLGNQPQHF

SEQ ID NO: 28727 - protein, 13 aa, synthetic construct
CASSLGQGYEQYF

SEQ ID NO: 28728 - protein, 13 aa, synthetic construct
CASSPRDSYEQYF

SEQ ID NO: 28729 - protein, 12 aa, synthetic construct
CASSRGPYEQYF

SEQ ID NO: 28730 - protein, 16 aa, synthetic construct
CASSNIKGDFGYGYTF

SEQ ID NO: 28731 - protein, 12 aa, synthetic construct
CASSYGAGELFF

SEQ ID NO: 28732 - protein, 12 aa, synthetic construct
CASSFRAGELFF

SEQ ID NO: 28733 - protein, 12 aa, synthetic construct
CASSQGNYGYTF

SEQ ID NO: 28734 - protein, 13 aa, synthetic construct
CASRDGSTDTQYF

SEQ ID NO: 28735 - protein, 14 aa, synthetic construct
CASSYGGRREKLFF

SEQ ID NO: 28736 - protein, 14 aa, synthetic construct
CASSYDLHGETQYF

SEQ ID NO: 28737 - protein, 14 aa, synthetic construct
CASSRTGGGQPQHF

SEQ ID NO: 28738 - protein, 17 aa, synthetic construct
CASGLRTSGYRPPEQFF

SEQ ID NO: 28739 - protein, 15 aa, synthetic construct
CASSPPGLSVYGYTF

SEQ ID NO: 28740 - protein, 16 aa, synthetic construct
CASSQTSGSSKNIQYF

SEQ ID NO: 28741 - protein, 15 aa, synthetic construct
CASSGQGAFTGELFF

SEQ ID NO: 28742 - protein, 15 aa, synthetic construct
CASSQDLAGDNEQFF

SEQ ID NO: 28743 - protein, 15 aa, synthetic construct
CASSQSRDSRDEQFF

SEQ ID NO: 28744 - protein, 16 aa, synthetic construct
CASSPGAQGYYNEQFF

SEQ ID NO: 28745 - protein, 15 aa, synthetic construct
CASSYAGSDGTEAFF

SEQ ID NO: 28746 - protein, 16 aa, synthetic construct
CATSNSLAQRNNEQFF

SEQ ID NO: 28747 - protein, 15 aa, synthetic construct
CSASQPAGGGDEQYF

SEQ ID NO: 28748 - protein, 12 aa, synthetic construct
CASKGMNTEAFF

SEQ ID NO: 28749 - protein, 13 aa, synthetic construct
CASNQGLNTEAFF

SEQ ID NO: 28750 - protein, 15 aa, synthetic construct
CASSIYRVPTGELFF

SEQ ID NO: 28751 - protein, 14 aa, synthetic construct
CASSPVDGNQPQHF

SEQ ID NO: 28752 - protein, 17 aa, synthetic construct
CASSYVAGGPRDYEQFF

SEQ ID NO: 28753 - protein, 13 aa, synthetic construct
CASSLVAGTGVGF

SEQ ID NO: 28754 - protein, 14 aa, synthetic construct
CSVEILAGRDEQYF

SEQ ID NO: 28755 - protein, 16 aa, synthetic construct
CASSSRRQAKQETQYF

SEQ ID NO: 28756 - protein, 14 aa, synthetic construct
CASGSSGSLKEQFF

SEQ ID NO: 28757 - protein, 14 aa, synthetic construct
CASTGQGATGELFF

SEQ ID NO: 28758 - protein, 15 aa, synthetic construct
CASSLDRAGNYGYTF

SEQ ID NO: 28759 - protein, 13 aa, synthetic construct
CSARTTGTETQYF

SEQ ID NO: 28760 - protein, 16 aa, synthetic construct
CATSDSRRSSNQPQHF

SEQ ID NO: 28761 - protein, 17 aa, synthetic construct
CASSIDPAGGFYNEQFF

SEQ ID NO: 28762 - protein, 13 aa, synthetic construct
CASSTGAAQPQHF

SEQ ID NO: 28763 - protein, 13 aa, synthetic construct
CSARNSGSYEQYF

SEQ ID NO: 28764 - protein, 14 aa, synthetic construct
CASSARLGADTQYF

SEQ ID NO: 28765 - protein, 11 aa, synthetic construct
CASSEGYEQYF

SEQ ID NO: 28766 - protein, 15 aa, synthetic construct
CASSQARTGGTEAFF

SEQ ID NO: 28767 - protein, 14 aa, synthetic construct
CASRAGSTGNTIYF

SEQ ID NO: 28768 - protein, 15 aa, synthetic construct
CASSVSRTGQETQYF

SEQ ID NO: 28769 - protein, 14 aa, synthetic construct
CASSSRGTGTEAFF

SEQ ID NO: 28770 - protein, 12 aa, synthetic construct
CASREDTYEQYF

SEQ ID NO: 28771 - protein, 15 aa, synthetic construct
CASSDGQVGNQPQHF

SEQ ID NO: 28772 - protein, 14 aa, synthetic construct
CAISDTGRGEKLFF

SEQ ID NO: 28773 - protein, 15 aa, synthetic construct
CASSLEPRSNQPQHF

SEQ ID NO: 28774 - protein, 15 aa, synthetic construct
CASSLEGQSTDTQYF

SEQ ID NO: 28775 - protein, 14 aa, synthetic construct
CASSPGTGTYEQYF

SEQ ID NO: 28776 - protein, 13 aa, synthetic construct
CASSADRWDIQYF

SEQ ID NO: 28777 - protein, 17 aa, synthetic construct
CASSAPGQGADTGELFF

SEQ ID NO: 28778 - protein, 14 aa, synthetic construct
CASSATGANTEAFF

SEQ ID NO: 28779 - protein, 18 aa, synthetic construct
CASSNGLAGGPNTGELFF

SEQ ID NO: 28780 - protein, 12 aa, synthetic construct
CASSGTGQTQYF

SEQ ID NO: 28781 - protein, 15 aa, synthetic construct
CASSLAGSTNEKLFF

SEQ ID NO: 28782 - protein, 15 aa, synthetic construct
CASSSQKISGNTIYF

SEQ ID NO: 28783 - protein, 18 aa, synthetic construct
CASSQDRTGTGFTGELFF

SEQ ID NO: 28784 - protein, 16 aa, synthetic construct
CASSLTAGGTYNEQFF

SEQ ID NO: 28785 - protein, 15 aa, synthetic construct
CASSPDSTRQGEAFF

SEQ ID NO: 28786 - protein, 13 aa, synthetic construct
CASSPPSGQPQHF

SEQ ID NO: 28787 - protein, 15 aa, synthetic construct
CSARDPKGRGTEAFF

SEQ ID NO: 28788 - protein, 14 aa, synthetic construct
CASSLTGGGETQYF

SEQ ID NO: 28789 - protein, 19 aa, synthetic construct
CASGLTGGGFLGSNQPQHF

SEQ ID NO: 28790 - protein, 14 aa, synthetic construct
CASSQDTRNQPQHF

SEQ ID NO: 28791 - protein, 12 aa, synthetic construct
CASSQGTQPQHF

SEQ ID NO: 28792 - protein, 14 aa, synthetic construct
CASSVGTANTEAFF

SEQ ID NO: 28793 - protein, 13 aa, synthetic construct
CASSITGVTEAFF

SEQ ID NO: 28794 - protein, 14 aa, synthetic construct
CASSLSTGTHDYTF

SEQ ID NO: 28795 - protein, 19 aa, synthetic construct
CASSPQLLIPGQGSYEQYF

SEQ ID NO: 28796 - protein, 13 aa, synthetic construct
CASSLDSNQPQHF

SEQ ID NO: 28797 - protein, 17 aa, synthetic construct
CASSLAGGPGVVYGYTF

SEQ ID NO: 28798 - protein, 14 aa, synthetic construct
CASSLGQGAYEQYF

SEQ ID NO: 28799 - protein, 16 aa, synthetic construct
CSAVGLGAYGNQPQHF

SEQ ID NO: 28800 - protein, 13 aa, synthetic construct
CASSLAGANVLTF

SEQ ID NO: 28801 - protein, 15 aa, synthetic construct
CASSLGSAGGYEQYF

SEQ ID NO: 28802 - protein, 13 aa, synthetic construct
CASSLSGRETQYF

SEQ ID NO: 28803 - protein, 17 aa, synthetic construct
CASSFELAGGGRRELFF

SEQ ID NO: 28804 - protein, 15 aa, synthetic construct
CASSLAGATNEKLFF

SEQ ID NO: 28805 - protein, 12 aa, synthetic construct
CASSDRDYGYTF

SEQ ID NO: 28806 - protein, 13 aa, synthetic construct
CASSEKTDYEQYF

SEQ ID NO: 28807 - protein, 13 aa, synthetic construct
CASSLVAHEKLFF

SEQ ID NO: 28808 - protein, 15 aa, synthetic construct
CASSFTPDYPYEQYF

SEQ ID NO: 28809 - protein, 15 aa, synthetic construct
CASSYRDRGNSPLHF

SEQ ID NO: 28810 - protein, 15 aa, synthetic construct
CASSSTITAKDEQYF

SEQ ID NO: 28811 - protein, 12 aa, synthetic construct
CASSLAGKELFF

SEQ ID NO: 28812 - protein, 16 aa, synthetic construct
CASSFSGTGGTDTQYF

SEQ ID NO: 28813 - protein, 15 aa, synthetic construct
CSAREYQGSPGELFF

SEQ ID NO: 28814 - protein, 17 aa, synthetic construct
CASSYPQAEYSNQPQHF

SEQ ID NO: 28815 - protein, 15 aa, synthetic construct
CASSVPRGGNQPQHF

SEQ ID NO: 28816 - protein, 14 aa, synthetic construct
CASSSPGLEETQYF

SEQ ID NO: 28817 - protein, 13 aa, synthetic construct
CAISDADPAEQYF

SEQ ID NO: 28818 - protein, 17 aa, synthetic construct
CASSQDSQGTLASEAFF

SEQ ID NO: 28819 - protein, 13 aa, synthetic construct
CATRTANTGELFF

SEQ ID NO: 28820 - protein, 15 aa, synthetic construct
CASSIGVDGYYEQYF

SEQ ID NO: 28821 - protein, 15 aa, synthetic construct
CASSQDGHGKVAQHF

SEQ ID NO: 28822 - protein, 15 aa, synthetic construct
CASSPTSGRPGELFF

SEQ ID NO: 28823 - protein, 11 aa, synthetic construct
CASSQGYEQYF

SEQ ID NO: 28824 - protein, 17 aa, synthetic construct
CASSRGTGVTNTGELFF

SEQ ID NO: 28825 - protein, 15 aa, synthetic construct
CASSLETGDTGELFF

SEQ ID NO: 28826 - protein, 14 aa, synthetic construct
CASSPRQNNEKLFF

SEQ ID NO: 28827 - protein, 14 aa, synthetic construct
CASSSRGKGYEQYF

SEQ ID NO: 28828 - protein, 15 aa, synthetic construct
CASSWVASSYNEQFF

SEQ ID NO: 28829 - protein, 13 aa, synthetic construct
CASSVEYQETQYF

SEQ ID NO: 28830 - protein, 14 aa, synthetic construct
CASSLGPYADTQYF

SEQ ID NO: 28831 - protein, 13 aa, synthetic construct
CASSPGGSYEQYF

SEQ ID NO: 28832 - protein, 14 aa, synthetic construct
CASSLSWGGDGYTF

SEQ ID NO: 28833 - protein, 13 aa, synthetic construct
CASSISVNTEAFF

SEQ ID NO: 28834 - protein, 13 aa, synthetic construct
CASSPRDTGPFTY

SEQ ID NO: 28835 - protein, 12 aa, synthetic construct
CASSLGVPEAFF

SEQ ID NO: 28836 - protein, 14 aa, synthetic construct
CASSAWSYNSPLHF

SEQ ID NO: 28837 - protein, 19 aa, synthetic construct
CASRKTYISRGATNTEAFF

SEQ ID NO: 28838 - protein, 12 aa, synthetic construct
CASSFPVDEQYF

SEQ ID NO: 28839 - protein, 13 aa, synthetic construct
CSAIRQGAPGYTF

SEQ ID NO: 28840 - protein, 14 aa, synthetic construct
CASSFGDSYNEQFF

SEQ ID NO: 28841 - protein, 17 aa, synthetic construct
CASSFGQIHTKKETQYF

SEQ ID NO: 28842 - protein, 20 aa, synthetic construct
CASSLRPSGSRGRSQETQYF

SEQ ID NO: 28843 - protein, 12 aa, synthetic construct
CASSGTVYGYTF

SEQ ID NO: 28844 - protein, 11 aa, synthetic construct
CASSLFNEQFF

SEQ ID NO: 28845 - protein, 15 aa, synthetic construct
CASAFSGRNTDTQYF

SEQ ID NO: 28846 - protein, 14 aa, synthetic construct
CAIDASGGADEQFF

SEQ ID NO: 28847 - protein, 12 aa, synthetic construct
CASSRSYNEQFF

SEQ ID NO: 28848 - protein, 13 aa, synthetic construct
CSARAIQGSPLHF

SEQ ID NO: 28849 - protein, 15 aa, synthetic construct
CSARVAGKDTGELFF

SEQ ID NO: 28850 - protein, 13 aa, synthetic construct
CASSLDSVTEAFF

SEQ ID NO: 28851 - protein, 14 aa, synthetic construct
CASSDRGSTGELFF

SEQ ID NO: 28852 - protein, 17 aa, synthetic construct
CASSGLAGALAKNIQYF

SEQ ID NO: 28853 - protein, 14 aa, synthetic construct
CASSAHGPSDTQYF

SEQ ID NO: 28854 - protein, 13 aa, synthetic construct
CASRAKVGNTIYF

SEQ ID NO: 28855 - protein, 15 aa, synthetic construct
CASSAQGREQETQYF

SEQ ID NO: 28856 - protein, 16 aa, synthetic construct
CASRRIASGVVNEQFF

SEQ ID NO: 28857 - protein, 14 aa, synthetic construct
CSARQGGVADTQYF

SEQ ID NO: 28858 - protein, 13 aa, synthetic construct
CASSWNRNTEAFF

SEQ ID NO: 28859 - protein, 18 aa, synthetic construct
CASSSPPGLAGATDTQYF

SEQ ID NO: 28860 - protein, 14 aa, synthetic construct
CASSPRISNQPQHF

SEQ ID NO: 28861 - protein, 16 aa, synthetic construct
CASSVGTSGLQETQYF

SEQ ID NO: 28862 - protein, 15 aa, synthetic construct
CASSRLAGNTGELFF

SEQ ID NO: 28863 - protein, 20 aa, synthetic construct
CASIGRWAGNQNQTYNEQFF

SEQ ID NO: 28864 - protein, 15 aa, synthetic construct
CASSYSIGRNYGYTF

SEQ ID NO: 28865 - protein, 14 aa, synthetic construct
CASSIGTGTDTQYF

SEQ ID NO: 28866 - protein, 14 aa, synthetic construct
CASSPGGSTDTQYF

SEQ ID NO: 28867 - protein, 15 aa, synthetic construct
CASRPLGANTGELFF

SEQ ID NO: 28868 - protein, 13 aa, synthetic construct
CASSLGHRYEQYF

SEQ ID NO: 28869 - protein, 12 aa, synthetic construct
CASSLMDTEAFF

SEQ ID NO: 28870 - protein, 13 aa, synthetic construct
CASSEGSTYEQYF

SEQ ID NO: 28871 - protein, 13 aa, synthetic construct
CASSPDRGTEAFF

SEQ ID NO: 28872 - protein, 17 aa, synthetic construct
CATSDRTSGASTDTQYF

SEQ ID NO: 28873 - protein, 13 aa, synthetic construct
CASSYMWDQPQHF

SEQ ID NO: 28874 - protein, 14 aa, synthetic construct
CASSSDRGGEKLFF

SEQ ID NO: 28875 - protein, 14 aa, synthetic construct
CSAPDREDDYGYTF

SEQ ID NO: 28876 - protein, 13 aa, synthetic construct
CASNLPGNTEAFF

SEQ ID NO: 28877 - protein, 14 aa, synthetic construct
CASSYSGEGYEQYF

SEQ ID NO: 28878 - protein, 13 aa, synthetic construct
CASSLGVSYEQYF

SEQ ID NO: 28879 - protein, 14 aa, synthetic construct
CASSFGGPYYGYTF

SEQ ID NO: 28880 - protein, 13 aa, synthetic construct
CASSSNLVSPLHF

SEQ ID NO: 28881 - protein, 15 aa, synthetic construct
CASAPGGSGANVLTF

SEQ ID NO: 28882 - protein, 17 aa, synthetic construct
CSARDRNTGSWGSEQYF

SEQ ID NO: 28883 - protein, 15 aa, synthetic construct
CSASRGSTSQNIQYF

SEQ ID NO: 28884 - protein, 14 aa, synthetic construct
CASSLGQGGYEQYF

SEQ ID NO: 28885 - protein, 16 aa, synthetic construct
CASSLPLAGGYNEQFF

SEQ ID NO: 28886 - protein, 13 aa, synthetic construct
CASGPTGDNEQYF

SEQ ID NO: 28887 - protein, 15 aa, synthetic construct
CASSPPPSGIYEQYF

SEQ ID NO: 28888 - protein, 16 aa, synthetic construct
CASSVGPKGGNTEAFF

SEQ ID NO: 28889 - protein, 11 aa, synthetic construct
CASGGLAGAFF

SEQ ID NO: 28890 - protein, 13 aa, synthetic construct
CASSFVGIYEQYF

SEQ ID NO: 28891 - protein, 15 aa, synthetic construct
CASRRTSGRAYEQYF

SEQ ID NO: 28892 - protein, 14 aa, synthetic construct
CASSFQGLNTEAFF

SEQ ID NO: 28893 - protein, 14 aa, synthetic construct
CASSFSGQGRLQYF

SEQ ID NO: 28894 - protein, 15 aa, synthetic construct
CASSEVGLAYNEQFF

SEQ ID NO: 28895 - protein, 18 aa, synthetic construct
CASSSPGTGGSGANVLTF

SEQ ID NO: 28896 - protein, 13 aa, synthetic construct
CASSLSLNQPQHF

SEQ ID NO: 28897 - protein, 13 aa, synthetic construct
CASRLGWDNEQFF

SEQ ID NO: 28898 - protein, 16 aa, synthetic construct
CASSSLDSRTIYGYTF

SEQ ID NO: 28899 - protein, 14 aa, synthetic construct
CASSLRNMNTEAFF

SEQ ID NO: 28900 - protein, 13 aa, synthetic construct
CASSSGRNTEAFF

SEQ ID NO: 28901 - protein, 14 aa, synthetic construct
CASSVQGANYGYTF

SEQ ID NO: 28902 - protein, 15 aa, synthetic construct
CSVEATGGLYNEQFF

SEQ ID NO: 28903 - protein, 15 aa, synthetic construct
CASSPLLGGNQPQHF

SEQ ID NO: 28904 - protein, 18 aa, synthetic construct
CASSETSGVIGSSRELFF

SEQ ID NO: 28905 - protein, 14 aa, synthetic construct
CAISEPRGTDTQYF

SEQ ID NO: 28906 - protein, 12 aa, synthetic construct
CASSGQSYGYTF

SEQ ID NO: 28907 - protein, 13 aa, synthetic construct
CASSRDRNQPQHF

SEQ ID NO: 28908 - protein, 15 aa, synthetic construct
CASSSGQGSLRGYTF

SEQ ID NO: 28909 - protein, 12 aa, synthetic construct
CASSWGTGELFF

SEQ ID NO: 28910 - protein, 16 aa, synthetic construct
CASSAVSQGPGNTIYF

SEQ ID NO: 28911 - protein, 14 aa, synthetic construct
CASSYPLGGYGYTF

SEQ ID NO: 28912 - protein, 14 aa, synthetic construct
CASSLRSGSDTQYF

SEQ ID NO: 28913 - protein, 14 aa, synthetic construct
CASSLFGGDQPQHF

SEQ ID NO: 28914 - protein, 13 aa, synthetic construct
CSVLQAFIYGYTF

SEQ ID NO: 28915 - protein, 12 aa, synthetic construct
CASSPRTREAFF

SEQ ID NO: 28916 - protein, 12 aa, synthetic construct
CASSAVRGPQHF

SEQ ID NO: 28917 - protein, 13 aa, synthetic construct
CASSLRQDYGYTF

SEQ ID NO: 28918 - protein, 20 aa, synthetic construct
CASSLGQWGGRTSGANVLTF

SEQ ID NO: 28919 - protein, 13 aa, synthetic construct
CASSLGGGETQYF

SEQ ID NO: 28920 - protein, 13 aa, synthetic construct
CASSLRENYGYTF

SEQ ID NO: 28921 - protein, 14 aa, synthetic construct
CASSPGTGNYGYTF

SEQ ID NO: 28922 - protein, 14 aa, synthetic construct
CASSLGGGGQPQHF

SEQ ID NO: 28923 - protein, 14 aa, synthetic construct
CASSLGTGNYGYTF

SEQ ID NO: 28924 - protein, 17 aa, synthetic construct
CASSYSGLAGVYNEQFF

SEQ ID NO: 28925 - protein, 15 aa, synthetic construct
CASSTQRDSNQPQHF

SEQ ID NO: 28926 - protein, 13 aa, synthetic construct
CASRPRGTGELFF

SEQ ID NO: 28927 - protein, 13 aa, synthetic construct
CASSLVGGNEQFF

SEQ ID NO: 28928 - protein, 13 aa, synthetic construct
CSARTGISYGYTF

SEQ ID NO: 28929 - protein, 11 aa, synthetic construct
CASGRNTEAFF

SEQ ID NO: 28930 - protein, 14 aa, synthetic construct
CASSLTGGNQPQHF

SEQ ID NO: 28931 - protein, 13 aa, synthetic construct
CASSGGMNTEAFF

SEQ ID NO: 28932 - protein, 11 aa, synthetic construct
CASTQGYGYTF

SEQ ID NO: 28933 - protein, 12 aa, synthetic construct
CASSRRGAEAFF

SEQ ID NO: 28934 - protein, 14 aa, synthetic construct
CASSRGGENSPLHF

SEQ ID NO: 28935 - protein, 14 aa, synthetic construct
CASSPGHRQETQYF

SEQ ID NO: 28936 - protein, 14 aa, synthetic construct
CASSLDRGSYEQYF

SEQ ID NO: 28937 - protein, 12 aa, synthetic construct
CASSSGSGEQFF

SEQ ID NO: 28938 - protein, 13 aa, synthetic construct
CASTLQGSYEQYF

SEQ ID NO: 28939 - protein, 13 aa, synthetic construct
CASSPRLADTQYF

SEQ ID NO: 28940 - protein, 13 aa, synthetic construct
CASSLYSNQPQHF

SEQ ID NO: 28941 - protein, 14 aa, synthetic construct
CASSLGQFGTEAFF

SEQ ID NO: 28942 - protein, 11 aa, synthetic construct
CASSLDRSYTF

SEQ ID NO: 28943 - protein, 15 aa, synthetic construct
CASSAGDSTNQPQHF

SEQ ID NO: 28944 - protein, 16 aa, synthetic construct
CASSNTGGWGNQPQHF

SEQ ID NO: 28945 - protein, 12 aa, synthetic construct
CASSPLASEQFF

SEQ ID NO: 28946 - protein, 14 aa, synthetic construct
CASSLGNGNTEAFF

SEQ ID NO: 28947 - protein, 12 aa, synthetic construct
CASSLDRLEAFF

SEQ ID NO: 28948 - protein, 18 aa, synthetic construct
CASSSILASGTGATEAFF

SEQ ID NO: 28949 - protein, 16 aa, synthetic construct
CASSDITRLYNSPLHF

SEQ ID NO: 28950 - protein, 14 aa, synthetic construct
CSARRLAGGNEQFF

SEQ ID NO: 28951 - protein, 14 aa, synthetic construct
CASSWERGNSPLHF

SEQ ID NO: 28952 - protein, 16 aa, synthetic construct
CASSYKWREGQDTQYF

SEQ ID NO: 28953 - protein, 15 aa, synthetic construct
CASSSSGGSTDTQYF

SEQ ID NO: 28954 - protein, 14 aa, synthetic construct
CASHARQGIYGYTF

SEQ ID NO: 28955 - protein, 14 aa, synthetic construct
CASSLDGSNQPQHF

SEQ ID NO: 28956 - protein, 11 aa, synthetic construct
CSASRGPEAFF

SEQ ID NO: 28957 - protein, 15 aa, synthetic construct
CASILPGVWITEAFF

SEQ ID NO: 28958 - protein, 13 aa, synthetic construct
CSAKMDRKNIQYF

SEQ ID NO: 28959 - protein, 18 aa, synthetic construct
CASSQSGAPGLTVNEQFF

SEQ ID NO: 28960 - protein, 12 aa, synthetic construct
CASSTEEETQYF

SEQ ID NO: 28961 - protein, 14 aa, synthetic construct
CASSVDGTNEKLFF

SEQ ID NO: 28962 - protein, 14 aa, synthetic construct
CASSLEEYNSPLHF

SEQ ID NO: 28963 - protein, 12 aa, synthetic construct
CASSYGGETQYF

SEQ ID NO: 28964 - protein, 14 aa, synthetic construct
CASSDGTGYYEQYF

SEQ ID NO: 28965 - protein, 13 aa, synthetic construct
CASSSGTYDTQYF

SEQ ID NO: 28966 - protein, 15 aa, synthetic construct
CSARPGTGRVDRYTF

SEQ ID NO: 28967 - protein, 14 aa, synthetic construct
CSARDIRVQGEAFF

SEQ ID NO: 28968 - protein, 12 aa, synthetic construct
CASSFTRQPQHF

SEQ ID NO: 28969 - protein, 14 aa, synthetic construct
CASSGTGNAYEQYF

SEQ ID NO: 28970 - protein, 13 aa, synthetic construct
CAWRKGGRETQYF

SEQ ID NO: 28971 - protein, 16 aa, synthetic construct
CASSLGLAGRTGELFF

SEQ ID NO: 28972 - protein, 17 aa, synthetic construct
CASASGLAGGGQETQYF

SEQ ID NO: 28973 - protein, 13 aa, synthetic construct
CASGLEVNTEAFF

SEQ ID NO: 28974 - protein, 18 aa, synthetic construct
CASSPWGQDTSPYNEQFF

SEQ ID NO: 28975 - protein, 12 aa, synthetic construct
CSARGSDYGYTF

SEQ ID NO: 28976 - protein, 15 aa, synthetic construct
CASSPIARGTYEQYF

SEQ ID NO: 28977 - protein, 13 aa, synthetic construct
CSARTTGIYEQYF

SEQ ID NO: 28978 - protein, 15 aa, synthetic construct
CASSYDGTGPYGYTF

SEQ ID NO: 28979 - protein, 13 aa, synthetic construct
CASSSGGLDEQYF

SEQ ID NO: 28980 - protein, 15 aa, synthetic construct
CASSQTSGRTGELFF

SEQ ID NO: 28981 - protein, 14 aa, synthetic construct
CASSLPGTAYEQYF

SEQ ID NO: 28982 - protein, 13 aa, synthetic construct
CASSPTGGYEQYF

SEQ ID NO: 28983 - protein, 15 aa, synthetic construct
CSASQTQGRGGGYTF

SEQ ID NO: 28984 - protein, 14 aa, synthetic construct
CASSTIASLYEQYF

SEQ ID NO: 28985 - protein, 11 aa, synthetic construct
CASSRGTEAFF

SEQ ID NO: 28986 - protein, 15 aa, synthetic construct
CASSLVGGSNQPQHF

SEQ ID NO: 28987 - protein, 13 aa, synthetic construct
CASSLGVNTEAFF

SEQ ID NO: 28988 - protein, 13 aa, synthetic construct
CASGPPNTGELFF

SEQ ID NO: 28989 - protein, 13 aa, synthetic construct
CASSLETNYGYTF

SEQ ID NO: 28990 - protein, 18 aa, synthetic construct
CSARDWQKGGYSNQPQHF

SEQ ID NO: 28991 - protein, 15 aa, synthetic construct
CASSQGGQGNSPLHF

SEQ ID NO: 28992 - protein, 12 aa, synthetic construct
CASSQDQKTQYF

SEQ ID NO: 28993 - protein, 12 aa, synthetic construct
CSARDRARQRYF

SEQ ID NO: 28994 - protein, 14 aa, synthetic construct
CSARLAGGLNEQFF

SEQ ID NO: 28995 - protein, 16 aa, synthetic construct
CASSPFRQGINSPLHF

SEQ ID NO: 28996 - protein, 12 aa, synthetic construct
CSARSLNYGYTF

SEQ ID NO: 28997 - protein, 11 aa, synthetic construct
CASSLFDEQYF

SEQ ID NO: 28998 - protein, 14 aa, synthetic construct
CASSPDRVSYEQYF

SEQ ID NO: 28999 - protein, 13 aa, synthetic construct
CASSPTGNQPQHF

SEQ ID NO: 29000 - protein, 11 aa, synthetic construct
CASSTRTIGFF

SEQ ID NO: 29001 - protein, 13 aa, synthetic construct
CASRGTGDTEAFF

SEQ ID NO: 29002 - protein, 13 aa, synthetic construct
CASSLQSYQPQHF

SEQ ID NO: 29003 - protein, 18 aa, synthetic construct
CASSPDIGDSGGASEQFF

SEQ ID NO: 29004 - protein, 15 aa, synthetic construct
CASSGTGGGDSPLHF

SEQ ID NO: 29005 - protein, 15 aa, synthetic construct
CASSVIGARTDTQYF

SEQ ID NO: 29006 - protein, 13 aa, synthetic construct
CASSLLSNTEAFF

SEQ ID NO: 29007 - protein, 12 aa, synthetic construct
CASLRVSGELFF

SEQ ID NO: 29008 - protein, 15 aa, synthetic construct
CASRVFGGRTGELFF

SEQ ID NO: 29009 - protein, 21 aa, synthetic construct
CATLDRGGNGLAGTSSYEQYF

SEQ ID NO: 29010 - protein, 11 aa, synthetic construct
CAWRRDFEAFF

SEQ ID NO: 29011 - protein, 13 aa, synthetic construct
CASSFGGGYGYTF

SEQ ID NO: 29012 - protein, 14 aa, synthetic construct
CASSLDTMNTEAFF

SEQ ID NO: 29013 - protein, 10 aa, synthetic construct
CASSEYEQYF

SEQ ID NO: 29014 - protein, 15 aa, synthetic construct
CSAGTGTLSWETQYF

SEQ ID NO: 29015 - protein, 16 aa, synthetic construct
CASSQDRGHSYNEQFF

SEQ ID NO: 29016 - protein, 16 aa, synthetic construct
CASSFWGSSSTDTQYF

SEQ ID NO: 29017 - protein, 17 aa, synthetic construct
CASSSGHSAGPTDTQYF

SEQ ID NO: 29018 - protein, 17 aa, synthetic construct
CAWSGGAGSGTNQPQHF

SEQ ID NO: 29019 - protein, 14 aa, synthetic construct
CASSEEFARYEQYF

SEQ ID NO: 29020 - protein, 14 aa, synthetic construct
CASSVAAQGYGYTF

SEQ ID NO: 29021 - protein, 16 aa, synthetic construct
CASSEPLAGAGGEQFF

SEQ ID NO: 29022 - protein, 13 aa, synthetic construct
CASSPDSYNEQFF

SEQ ID NO: 29023 - protein, 14 aa, synthetic construct
CASSPSYRSIEQYF

SEQ ID NO: 29024 - protein, 14 aa, synthetic construct
CASWSRRTKGEQFF

SEQ ID NO: 29025 - protein, 13 aa, synthetic construct
CASSLGGREKLFF

SEQ ID NO: 29026 - protein, 14 aa, synthetic construct
CAISESTGSDTQYF

SEQ ID NO: 29027 - protein, 13 aa, synthetic construct
CASSLNAGDTQYF

SEQ ID NO: 29028 - protein, 12 aa, synthetic construct
CSVRVLQNIQYF

SEQ ID NO: 29029 - protein, 17 aa, synthetic construct
CASSFHSGRLYTGELFF

SEQ ID NO: 29030 - protein, 15 aa, synthetic construct
CAWNLLDSENSPLHF

SEQ ID NO: 29031 - protein, 11 aa, synthetic construct
CASSSEYEQYF

SEQ ID NO: 29032 - protein, 11 aa, synthetic construct
CASSLGDELFF

SEQ ID NO: 29033 - protein, 14 aa, synthetic construct
CASSPWTGAYEQYF

SEQ ID NO: 29034 - protein, 11 aa, synthetic construct
CAWTGGYEQYF

SEQ ID NO: 29035 - protein, 12 aa, synthetic construct
CASSPTGYEQYF

SEQ ID NO: 29036 - protein, 13 aa, synthetic construct
CASSSQGTEGYTF

SEQ ID NO: 29037 - protein, 15 aa, synthetic construct
CASSTRGQDADTQYF

SEQ ID NO: 29038 - protein, 17 aa, synthetic construct
CASSRRTGENSNYGYTF

SEQ ID NO: 29039 - protein, 13 aa, synthetic construct
CASRGPSSYEQYF

SEQ ID NO: 29040 - protein, 15 aa, synthetic construct
CASSLEEGPEETQYF

SEQ ID NO: 29041 - protein, 14 aa, synthetic construct
CAISVRGSDSPLHF

SEQ ID NO: 29042 - protein, 17 aa, synthetic construct
CASSLPGRLLGEREQYF

SEQ ID NO: 29043 - protein, 13 aa, synthetic construct
CASSVERTGELFF

SEQ ID NO: 29044 - protein, 16 aa, synthetic construct
CASSRQRLAAGSPLHF

SEQ ID NO: 29045 - protein, 13 aa, synthetic construct
CASSQDSSYEQYF

SEQ ID NO: 29046 - protein, 12 aa, synthetic construct
CASRGLSYEQYF

SEQ ID NO: 29047 - protein, 13 aa, synthetic construct
CASSQGQTYEQYF

SEQ ID NO: 29048 - protein, 12 aa, synthetic construct
CASSRTGGELFF

SEQ ID NO: 29049 - protein, 12 aa, synthetic construct
CASSSEGETQYF

SEQ ID NO: 29050 - protein, 14 aa, synthetic construct
CASRERGFTGELFF

SEQ ID NO: 29051 - protein, 14 aa, synthetic construct
CASSIGQGPYEQYF

SEQ ID NO: 29052 - protein, 16 aa, synthetic construct
CASSLGPGAGANVLTF

SEQ ID NO: 29053 - protein, 15 aa, synthetic construct
CASSSNLGVEYEQYF

SEQ ID NO: 29054 - protein, 14 aa, synthetic construct
CSARDGTSGETQYF

SEQ ID NO: 29055 - protein, 15 aa, synthetic construct
CASRVTGGSNQPQHF

SEQ ID NO: 29056 - protein, 16 aa, synthetic construct
CASSERDQQALDEQYF

SEQ ID NO: 29057 - protein, 14 aa, synthetic construct
CASSLGQSNQPQHF

SEQ ID NO: 29058 - protein, 13 aa, synthetic construct
CASSQGRNTEAFF

SEQ ID NO: 29059 - protein, 14 aa, synthetic construct
CAWSVQISGYEQYF

SEQ ID NO: 29060 - protein, 15 aa, synthetic construct
CASSKLADPYYEQYF

SEQ ID NO: 29061 - protein, 13 aa, synthetic construct
CASSLTGLTEAFF

SEQ ID NO: 29062 - protein, 14 aa, synthetic construct
CASSVAGGPGELFF

SEQ ID NO: 29063 - protein, 13 aa, synthetic construct
CASSQGTGYEQYF

SEQ ID NO: 29064 - protein, 14 aa, synthetic construct
CASSAGNGNQPQHF

SEQ ID NO: 29065 - protein, 13 aa, synthetic construct
CASGLRVNTEAFF

SEQ ID NO: 29066 - protein, 12 aa, synthetic construct
CASSLRTGELFF

SEQ ID NO: 29067 - protein, 15 aa, synthetic construct
CASSQEARGQQPQHF

SEQ ID NO: 29068 - protein, 14 aa, synthetic construct
CASSLSGLNTEAFF

SEQ ID NO: 29069 - protein, 17 aa, synthetic construct
CASSPAAATLERYGYTF

SEQ ID NO: 29070 - protein, 14 aa, synthetic construct
CASSRETGDQPQHF

SEQ ID NO: 29071 - protein, 14 aa, synthetic construct
CASSFMRADTEAFF

SEQ ID NO: 29072 - protein, 18 aa, synthetic construct
CASSQSATVWGNTGELFF

SEQ ID NO: 29073 - protein, 13 aa, synthetic construct
CASSQEPETEAFF

SEQ ID NO: 29074 - protein, 15 aa, synthetic construct
CASSQLADLSYEQYF

SEQ ID NO: 29075 - protein, 17 aa, synthetic construct
CASSQDALSTGANVLTF

SEQ ID NO: 29076 - protein, 14 aa, synthetic construct
CASTPTGLDQPQHF

SEQ ID NO: 29077 - protein, 15 aa, synthetic construct
CAWSAAGRYTGELFF

SEQ ID NO: 29078 - protein, 14 aa, synthetic construct
CASSRTGSNNEQFF

SEQ ID NO: 29079 - protein, 14 aa, synthetic construct
CASSLVRGTDTQYF

SEQ ID NO: 29080 - protein, 12 aa, synthetic construct
CASRLGNNEQFF

SEQ ID NO: 29081 - protein, 17 aa, synthetic construct
CSATTLTSGKEIDTQYF

SEQ ID NO: 29082 - protein, 14 aa, synthetic construct
CASKIMGLTDTQYF

SEQ ID NO: 29083 - protein, 16 aa, synthetic construct
CSAPRSQPSSYNEQFF

SEQ ID NO: 29084 - protein, 16 aa, synthetic construct
CSARDRAGGAYNEQFF

SEQ ID NO: 29085 - protein, 14 aa, synthetic construct
CASSPQGVRGEQFF

SEQ ID NO: 29086 - protein, 15 aa, synthetic construct
CASSFVGGGGQPQHF

SEQ ID NO: 29087 - protein, 12 aa, synthetic construct
CASSFLGNEQFF

SEQ ID NO: 29088 - protein, 16 aa, synthetic construct
CASSAPDWGGADTQYF

SEQ ID NO: 29089 - protein, 14 aa, synthetic construct
CASSWTTSTGELFF

SEQ ID NO: 29090 - protein, 13 aa, synthetic construct
CASRIQSNTEAFF

SEQ ID NO: 29091 - protein, 15 aa, synthetic construct
CASSFGSTAQETQYF

SEQ ID NO: 29092 - protein, 16 aa, synthetic construct
CASSPTLQGYADEAFF

SEQ ID NO: 29093 - protein, 15 aa, synthetic construct
CASSLDGLASYEQYF

SEQ ID NO: 29094 - protein, 14 aa, synthetic construct
CAWSEGRLDYEQYF

SEQ ID NO: 29095 - protein, 13 aa, synthetic construct
CASSLTSMETQYF

SEQ ID NO: 29096 - protein, 16 aa, synthetic construct
CSARSVETSREETQYF

SEQ ID NO: 29097 - protein, 14 aa, synthetic construct
CASSRREGTDTQYF

SEQ ID NO: 29098 - protein, 13 aa, synthetic construct
CASTYGWNTEAFF

SEQ ID NO: 29099 - protein, 14 aa, synthetic construct
CASSLGASNQPQHF

SEQ ID NO: 29100 - protein, 14 aa, synthetic construct
CSARGRQSNQPQHF

SEQ ID NO: 29101 - protein, 11 aa, synthetic construct
CAWSSNYGYTF

SEQ ID NO: 29102 - protein, 15 aa, synthetic construct
CASSAEAGGLSPQHF

SEQ ID NO: 29103 - protein, 18 aa, synthetic construct
CASSLVVNFRSSYNEQFF

SEQ ID NO: 29104 - protein, 13 aa, synthetic construct
CSATGTGVYGYTF

SEQ ID NO: 29105 - protein, 14 aa, synthetic construct
CASSLAQGNSPLHF

SEQ ID NO: 29106 - protein, 15 aa, synthetic construct
CATSREASGSYEQYF

SEQ ID NO: 29107 - protein, 12 aa, synthetic construct
CSARAEEGTQYF

SEQ ID NO: 29108 - protein, 14 aa, synthetic construct
CASSLTSGNREQYF

SEQ ID NO: 29109 - protein, 14 aa, synthetic construct
CASSIAGQSYGYTF

SEQ ID NO: 29110 - protein, 13 aa, synthetic construct
CASSSGPPLPQHF

SEQ ID NO: 29111 - protein, 15 aa, synthetic construct
CASSLDWTANNEQFF

SEQ ID NO: 29112 - protein, 16 aa, synthetic construct
CATSDLGAGEGNEQFF

SEQ ID NO: 29113 - protein, 13 aa, synthetic construct
CASSDSAMTEAFF

SEQ ID NO: 29114 - protein, 12 aa, synthetic construct
CASSQGGNEQYF

SEQ ID NO: 29115 - protein, 15 aa, synthetic construct
CASSSWDREKHGYTF

SEQ ID NO: 29116 - protein, 15 aa, synthetic construct
CSDDRFHSGSSEQYV

SEQ ID NO: 29117 - protein, 15 aa, synthetic construct
CASSLVPRVGLGYTF

SEQ ID NO: 29118 - protein, 13 aa, synthetic construct
CASSLSGNTEAFF

SEQ ID NO: 29119 - protein, 12 aa, synthetic construct
CASSSGTGELFF

SEQ ID NO: 29120 - protein, 14 aa, synthetic construct
CASSATSATGELFF

SEQ ID NO: 29121 - protein, 16 aa, synthetic construct
CAISESWVRTGNTIYF

SEQ ID NO: 29122 - protein, 18 aa, synthetic construct
CATTNPGARGVMDTEAFF

SEQ ID NO: 29123 - protein, 13 aa, synthetic construct
CSARDFQREGEFF

SEQ ID NO: 29124 - protein, 13 aa, synthetic construct
CASSSGGGQPQHF

SEQ ID NO: 29125 - protein, 13 aa, synthetic construct
CAMREGPLDDMRF

SEQ ID NO: 29126 - protein, 14 aa, synthetic construct
CAGQGGTSYGKLTF

SEQ ID NO: 29127 - protein, 15 aa, synthetic construct
CALSEDMNRDDKIIF

SEQ ID NO: 29128 - protein, 9 aa, synthetic construct
CAVGSDMRF

SEQ ID NO: 29129 - protein, 13 aa, synthetic construct
CAVNEGYGNKLVF

SEQ ID NO: 29130 - protein, 13 aa, synthetic construct
CAASDTGRRALTF

SEQ ID NO: 29131 - protein, 13 aa, synthetic construct
CIVQGSSGDKLTF

SEQ ID NO: 29132 - protein, 14 aa, synthetic construct
CAAVWRNQGGKLIF

SEQ ID NO: 29133 - protein, 15 aa, synthetic construct
CLVGDPKAAGNKLTF

SEQ ID NO: 29134 - protein, 13 aa, synthetic construct
CAYRSYNNNDMRF

SEQ ID NO: 29135 - protein, 16 aa, synthetic construct
CAVRGASIKDTDKLIF

SEQ ID NO: 29136 - protein, 11 aa, synthetic construct
CAVRPYGKLTF

SEQ ID NO: 29137 - protein, 12 aa, synthetic construct
CAVLDSNYQLIW

SEQ ID NO: 29138 - protein, 13 aa, synthetic construct
CAVSFSGTYKYIF

SEQ ID NO: 29139 - protein, 15 aa, synthetic construct
CVVSDRGSTLGRLYF

SEQ ID NO: 29140 - protein, 16 aa, synthetic construct
CAVRSFTGGGADGLTF

SEQ ID NO: 29141 - protein, 12 aa, synthetic construct
CAVMDSNYQLIW

SEQ ID NO: 29142 - protein, 12 aa, synthetic construct
CAVSGSARQLTF

SEQ ID NO: 29143 - protein, 15 aa, synthetic construct
CAAPVGGSGNTPLVF

SEQ ID NO: 29144 - protein, 13 aa, synthetic construct
CAVKGPKQAKIIF

SEQ ID NO: 29145 - protein, 17 aa, synthetic construct
CLVGDIILTGGGNKLTF

SEQ ID NO: 29146 - protein, 12 aa, synthetic construct
CAYQGGSEKLVF

SEQ ID NO: 29147 - protein, 15 aa, synthetic construct
CAVRGLQTGANNLFF

SEQ ID NO: 29148 - protein, 16 aa, synthetic construct
CAVRDPLTSGTYKYIF

SEQ ID NO: 29149 - protein, 11 aa, synthetic construct
CATDAGNDMRF

SEQ ID NO: 29150 - protein, 14 aa, synthetic construct
CAVRSSYNTDKLIF

SEQ ID NO: 29151 - protein, 14 aa, synthetic construct
CALSGRDSNYQLIW

SEQ ID NO: 29152 - protein, 18 aa, synthetic construct
CLVGDDRYSGGGADGLTF

SEQ ID NO: 29153 - protein, 16 aa, synthetic construct
CAEGHLASGGSYIPTF

SEQ ID NO: 29154 - protein, 19 aa, synthetic construct
CLVGDTDDYGSGNTGKLIF

SEQ ID NO: 29155 - protein, 13 aa, synthetic construct
CAGRTDSWGKLQF

SEQ ID NO: 29156 - protein, 15 aa, synthetic construct
CAEMYSGGGADGLTF

SEQ ID NO: 29157 - protein, 15 aa, synthetic construct
CIVRVEMDSSYKLIF

SEQ ID NO: 29158 - protein, 11 aa, synthetic construct
CAGDRDDKIIF

SEQ ID NO: 29159 - protein, 12 aa, synthetic construct
CAGDRGAQKLVF

SEQ ID NO: 29160 - protein, 14 aa, synthetic construct
CAVSDLDTGNQFYF

SEQ ID NO: 29161 - protein, 12 aa, synthetic construct
CAVEDPGYALNF

SEQ ID NO: 29162 - protein, 15 aa, synthetic construct
CAYRSANFGNEKLTF

SEQ ID NO: 29163 - protein, 14 aa, synthetic construct
CAVRGSGGSYIPTF

SEQ ID NO: 29164 - protein, 12 aa, synthetic construct
CAGEEAGTALIF

SEQ ID NO: 29165 - protein, 10 aa, synthetic construct
CAATGNQFYF

SEQ ID NO: 29166 - protein, 12 aa, synthetic construct
CVGGVNDYKLSF

SEQ ID NO: 29167 - protein, 15 aa, synthetic construct
CAGMNYGGSQGNLIF

SEQ ID NO: 29168 - protein, 12 aa, synthetic construct
CAVMEAGTALIF

SEQ ID NO: 29169 - protein, 13 aa, synthetic construct
CAGQETSGSRLTF

SEQ ID NO: 29170 - protein, 10 aa, synthetic construct
CVVNNNDMRF

SEQ ID NO: 29171 - protein, 11 aa, synthetic construct
CAAWRNTPLVF

SEQ ID NO: 29172 - protein, 11 aa, synthetic construct
CAFMRSIDMRF

SEQ ID NO: 29173 - protein, 13 aa, synthetic construct
CAFIPFGNEKLTF

SEQ ID NO: 29174 - protein, 16 aa, synthetic construct
CLVGDMGLGGYNKLIF

SEQ ID NO: 29175 - protein, 13 aa, synthetic construct
CAEGSGGYNKLIF

SEQ ID NO: 29176 - protein, 6 aa, synthetic construct
CAGPLF

SEQ ID NO: 29177 - protein, 14 aa, synthetic construct
CAESTPGGGNKLTF

SEQ ID NO: 29178 - protein, 15 aa, synthetic construct
CAVRDNEEGSYIPTF

SEQ ID NO: 29179 - protein, 13 aa, synthetic construct
CVVNVRSNYQLIW

SEQ ID NO: 29180 - protein, 16 aa, synthetic construct
CAASASSGTSYGKLTF

SEQ ID NO: 29181 - protein, 12 aa, synthetic construct
CAVKAHNNDMRF

SEQ ID NO: 29182 - protein, 17 aa, synthetic construct
CALSWLHGSSNTGKLIF

SEQ ID NO: 29183 - protein, 12 aa, synthetic construct
CIDGGSQGNLIF

SEQ ID NO: 29184 - protein, 11 aa, synthetic construct
CAASTRNQFYF

SEQ ID NO: 29185 - protein, 18 aa, synthetic construct
CAASIVMIGSSNTGKLIF

SEQ ID NO: 29186 - protein, 12 aa, synthetic construct
CAALSNTGKLIF

SEQ ID NO: 29187 - protein, 14 aa, synthetic construct
CAVGANQAGTALIF

SEQ ID NO: 29188 - protein, 11 aa, synthetic construct
CALATGNQFYF

SEQ ID NO: 29189 - protein, 15 aa, synthetic construct
CAATVNTGTASKLTF

SEQ ID NO: 29190 - protein, 14 aa, synthetic construct
CAMSGSGGYQKVTF

SEQ ID NO: 29191 - protein, 13 aa, synthetic construct
CAVGALNDYKLSF

SEQ ID NO: 29192 - protein, 17 aa, synthetic construct
CIVRVAVGGGSNYKLTF

SEQ ID NO: 29193 - protein, 11 aa, synthetic construct
CAVKYGQNFVF

SEQ ID NO: 29194 - protein, 17 aa, synthetic construct
CAVRDLTPGSGNTPLVF

SEQ ID NO: 29195 - protein, 13 aa, synthetic construct
CAVRRGSNYQLIW

SEQ ID NO: 29196 - protein, 12 aa, synthetic construct
CAVKEGNTPLVF

SEQ ID NO: 29197 - protein, 13 aa, synthetic construct
CAVMETSGSRLTF

SEQ ID NO: 29198 - protein, 13 aa, synthetic construct
CAATLYNFNKFYF

SEQ ID NO: 29199 - protein, 10 aa, synthetic construct
CAVSDRDMRF

SEQ ID NO: 29200 - protein, 13 aa, synthetic construct
CAARQGGSEKLVF

SEQ ID NO: 29201 - protein, 13 aa, synthetic construct
CALSSWGNEKLTF

SEQ ID NO: 29202 - protein, 13 aa, synthetic construct
CVVNIDSWGKLQF

SEQ ID NO: 29203 - protein, 12 aa, synthetic construct
CAVYSSASKIIF

SEQ ID NO: 29204 - protein, 14 aa, synthetic construct
CAYKKDTGRRALTF

SEQ ID NO: 29205 - protein, 14 aa, synthetic construct
CAASIRGNTGKLIF

SEQ ID NO: 29206 - protein, 15 aa, synthetic construct
CAVSETNFGNEKLTF

SEQ ID NO: 29207 - protein, 11 aa, synthetic construct
CIQDNNNDMRF

SEQ ID NO: 29208 - protein, 14 aa, synthetic construct
CAVGSNQAGTALIF

SEQ ID NO: 29209 - protein, 11 aa, synthetic construct
CAGGATNKLIF

SEQ ID NO: 29210 - protein, 15 aa, synthetic construct
CALSAGGTSYGKLTF

SEQ ID NO: 29211 - protein, 13 aa, synthetic construct
CAASWAGADGLTF

SEQ ID NO: 29212 - protein, 12 aa, synthetic construct
CAPRGRDYKLSF

SEQ ID NO: 29213 - protein, 17 aa, synthetic construct
CASSTAGTSGAVNEQFF

SEQ ID NO: 29214 - protein, 15 aa, synthetic construct
CATSILGGDYNEQFF

SEQ ID NO: 29215 - protein, 12 aa, synthetic construct
CASMRNTGELFF

SEQ ID NO: 29216 - protein, 15 aa, synthetic construct
CASSLVEQIGSEQFF

SEQ ID NO: 29217 - protein, 14 aa, synthetic construct
CASSLSPTNYGYTF

SEQ ID NO: 29218 - protein, 12 aa, synthetic construct
CASSFGGGEQFF

SEQ ID NO: 29219 - protein, 14 aa, synthetic construct
CASSLVSSYNEQFF

SEQ ID NO: 29220 - protein, 13 aa, synthetic construct
CSVLQAFIYGYTF

SEQ ID NO: 29221 - protein, 12 aa, synthetic construct
CASSLGVYEQYF

SEQ ID NO: 29222 - protein, 15 aa, synthetic construct
CASTRTYSSTDTQYF

SEQ ID NO: 29223 - protein, 15 aa, synthetic construct
CASSPIAGVENEQFF

SEQ ID NO: 29224 - protein, 15 aa, synthetic construct
CASSQVAGFPDTQYF

SEQ ID NO: 29225 - protein, 12 aa, synthetic construct
CASSSGSGEQFF

SEQ ID NO: 29226 - protein, 14 aa, synthetic construct
CASSPTGVGSPLHF

SEQ ID NO: 29227 - protein, 13 aa, synthetic construct
CASSVAGGYEQYF

SEQ ID NO: 29228 - protein, 16 aa, synthetic construct
CASSERDQQALDEQYF

SEQ ID NO: 29229 - protein, 16 aa, synthetic construct
CASSQDRGHSYNEQFF

SEQ ID NO: 29230 - protein, 14 aa, synthetic construct
CSARDGTSGETQYF

SEQ ID NO: 29231 - protein, 13 aa, synthetic construct
CASSPGTGYEQYF

SEQ ID NO: 29232 - protein, 12 aa, synthetic construct
CASSPDSYEQYF

SEQ ID NO: 29233 - protein, 14 aa, synthetic construct
CASWSRRTKGEQFF

SEQ ID NO: 29234 - protein, 13 aa, synthetic construct
CASSYGQGYEQYF

SEQ ID NO: 29235 - protein, 11 aa, synthetic construct
CASSLNTEAFF

SEQ ID NO: 29236 - protein, 13 aa, synthetic construct
CASSPGLAYEQYF

SEQ ID NO: 29237 - protein, 16 aa, synthetic construct
CASSFWGSSSTDTQYF

SEQ ID NO: 29238 - protein, 15 aa, synthetic construct
CASSSNLGVEYEQYF

SEQ ID NO: 29239 - protein, 12 aa, synthetic construct
CASSYSGQGYTF

SEQ ID NO: 29240 - protein, 11 aa, synthetic construct
CASSLASEQYF

SEQ ID NO: 29241 - protein, 14 aa, synthetic construct
CASSSGTGAYEQYF

SEQ ID NO: 29242 - protein, 13 aa, synthetic construct
CASSPGQGYEQYF

SEQ ID NO: 29243 - protein, 12 aa, synthetic construct
CASSLGNTEAFF

SEQ ID NO: 29244 - protein, 14 aa, synthetic construct
CASSLGQSNQPQHF

SEQ ID NO: 29245 - protein, 11 aa, synthetic construct
CASSDSYEQYF

SEQ ID NO: 29246 - protein, 14 aa, synthetic construct
CAIGTGDSNQPQHF

SEQ ID NO: 29247 - protein, 15 aa, synthetic construct
CASRRTSGSYNEQFF

SEQ ID NO: 29248 - protein, 13 aa, synthetic construct
CASSPGTAYEQYF

SEQ ID NO: 29249 - protein, 15 aa, synthetic construct
CASSLRSSGDGTQYF

SEQ ID NO: 29250 - protein, 12 aa, synthetic construct
CSARDRNYGYTF

SEQ ID NO: 29251 - protein, 14 aa, synthetic construct
CASSLGGNTGELFF

SEQ ID NO: 29252 - protein, 14 aa, synthetic construct
CASSLSGGNQPQHF

SEQ ID NO: 29253 - protein, 14 aa, synthetic construct
CASSFSLAGNEQFF

SEQ ID NO: 29254 - protein, 12 aa, synthetic construct
CASSLVNTEAFF

SEQ ID NO: 29255 - protein, 12 aa, synthetic construct
CASSPGGTEAFF

SEQ ID NO: 29256 - protein, 14 aa, synthetic construct
CASSPAGTDYGYTF

SEQ ID NO: 29257 - protein, 16 aa, synthetic construct
CASRLKREGSYNEQFF

SEQ ID NO: 29258 - protein, 14 aa, synthetic construct
CASSEDRREDTQYF

SEQ ID NO: 29259 - protein, 15 aa, synthetic construct
CASTRLAGANNEQFF

SEQ ID NO: 29260 - protein, 17 aa, synthetic construct
CASSDPLGAGSTDTQYF

SEQ ID NO: 29261 - protein, 17 aa, synthetic construct
CSVFAVVASGSRYEQYF

SEQ ID NO: 29262 - protein, 12 aa, synthetic construct
CATSHSNQPQHF

SEQ ID NO: 29263 - protein, 16 aa, synthetic construct
CASSPTGTSSTDTQYF

SEQ ID NO: 29264 - protein, 15 aa, synthetic construct
CASSVGRGRDTEAFF

SEQ ID NO: 29265 - protein, 16 aa, synthetic construct
CSARGRLAGEFSEQYF

SEQ ID NO: 29266 - protein, 13 aa, synthetic construct
CASSPDRGTEAFF

SEQ ID NO: 29267 - protein, 15 aa, synthetic construct
CASSQLAGATDTQYF

SEQ ID NO: 29268 - protein, 13 aa, synthetic construct
CAMREIRTGKSTF

SEQ ID NO: 29269 - protein, 11 aa, synthetic construct
CIVRVEDDMRF

SEQ ID NO: 29270 - protein, 15 aa, synthetic construct
CAMREGRNRYSTLTF

SEQ ID NO: 29271 - protein, 15 aa, synthetic construct
CAVSLIIQGAQKLVF

SEQ ID NO: 29272 - protein, 14 aa, synthetic construct
CAVRSPSGNYQLIW

SEQ ID NO: 29273 - protein, 14 aa, synthetic construct
CALYSGAGSYQLTF

SEQ ID NO: 29274 - protein, 13 aa, synthetic construct
CAYRQYNNNDMRF

SEQ ID NO: 29275 - protein, 12 aa, synthetic construct
CAVLGGSEKLVF

SEQ ID NO: 29276 - protein, 10 aa, synthetic construct
CAVGSPDMRF

SEQ ID NO: 29277 - protein, 15 aa, synthetic construct
CIVRGLTGGGNKLTF

SEQ ID NO: 29278 - protein, 13 aa, synthetic construct
CLVFIGFGNVLHC

SEQ ID NO: 29279 - protein, 14 aa, synthetic construct
CAAYSGGGADGLTF

SEQ ID NO: 29280 - protein, 16 aa, synthetic construct
CATDGLGGGGADGLTF

SEQ ID NO: 29281 - protein, 12 aa, synthetic construct
CALGGSQGNLIF

SEQ ID NO: 29282 - protein, 10 aa, synthetic construct
CAESTGKLIF

SEQ ID NO: 29283 - protein, 11 aa, synthetic construct
CAGRDGGKSTF

SEQ ID NO: 29284 - protein, 13 aa, synthetic construct
CAIRADSWGKLQF

SEQ ID NO: 29285 - protein, 16 aa, synthetic construct
CILPLRGGTSYGKLTF

SEQ ID NO: 29286 - protein, 16 aa, synthetic construct
CILPLAGGTSYGKLTF

SEQ ID NO: 29287 - protein, 14 aa, synthetic construct
CAMRDEKGAQKLVF

SEQ ID NO: 29288 - protein, 12 aa, synthetic construct
CALCYNNNDMRF

SEQ ID NO: 29289 - protein, 15 aa, synthetic construct
CIVRVGGDSWGKLQF

SEQ ID NO: 29290 - protein, 15 aa, synthetic construct
CAFMTRGSTLGRLYF

SEQ ID NO: 29291 - protein, 12 aa, synthetic construct
CAESIGDYKLSF

SEQ ID NO: 29292 - protein, 16 aa, synthetic construct
CILRGAGGTSYGKLTF

SEQ ID NO: 29293 - protein, 16 aa, synthetic construct
CAVLGAGGTSYGKLTF

SEQ ID NO: 29294 - protein, 13 aa, synthetic construct
CGTEYSNDYKLSF

SEQ ID NO: 29295 - protein, 13 aa, synthetic construct
CAEKASGTYKYIF

SEQ ID NO: 29296 - protein, 11 aa, synthetic construct
CAEDRDARLMF

SEQ ID NO: 29297 - protein, 16 aa, synthetic construct
CILPLEGGTSYGKLTF

SEQ ID NO: 29298 - protein, 15 aa, synthetic construct
CATERITGGGNKLTF

SEQ ID NO: 29299 - protein, 11 aa, synthetic construct
CAVKDTDKLIF

SEQ ID NO: 29300 - protein, 9 aa, synthetic construct
CAEDNRLMF

SEQ ID NO: 29301 - protein, 15 aa, synthetic construct
CVVNFRNSGNTPLVF

SEQ ID NO: 29302 - protein, 11 aa, synthetic construct
CAGFPNNDMRF

SEQ ID NO: 29303 - protein, 13 aa, synthetic construct
CVVGGTSYGKLTF

SEQ ID NO: 29304 - protein, 14 aa, synthetic construct
CAAAGTSGTYKYIF

SEQ ID NO: 29305 - protein, 15 aa, synthetic construct
CAMSYSGGSNYKLTF

SEQ ID NO: 29306 - protein, 11 aa, synthetic construct
CAVQGNEKLTF

SEQ ID NO: 29307 - protein, 16 aa, synthetic construct
CASGDAGGTSYGKLTF

SEQ ID NO: 29308 - protein, 14 aa, synthetic construct
CGADVTSGTYKYIF

SEQ ID NO: 29309 - protein, 15 aa, synthetic construct
CIVRVATNRDDKIIF

SEQ ID NO: 29310 - protein, 13 aa, synthetic construct
CAVTYTGGFKTIF

SEQ ID NO: 29311 - protein, 12 aa, synthetic construct
CQARDAGNMLTF

SEQ ID NO: 29312 - protein, 14 aa, synthetic construct
CAASAQGGSEKLVF

SEQ ID NO: 29313 - protein, 15 aa, synthetic construct
CAMSESGGSNYKLTF

SEQ ID NO: 29314 - protein, 15 aa, synthetic construct
CVAPGGPNSGYALNF

SEQ ID NO: 29315 - protein, 15 aa, synthetic construct
CAAPPSTSGTYKYIF

SEQ ID NO: 29316 - protein, 12 aa, synthetic construct
CAFIDYGQNFVF

SEQ ID NO: 29317 - protein, 14 aa, synthetic construct
CAVSDLGGSYIPTF

SEQ ID NO: 29318 - protein, 16 aa, synthetic construct
CAMREDMNTGFQKLVF

SEQ ID NO: 29319 - protein, 15 aa, synthetic construct
CGAASGGTSYGKLTF

SEQ ID NO: 29320 - protein, 13 aa, synthetic construct
CAVGSPTDYKLSF

SEQ ID NO: 29321 - protein, 10 aa, synthetic construct
CVVNIDRLMF

SEQ ID NO: 29322 - protein, 11 aa, synthetic construct
CAAPGDDKIIF

SEQ ID NO: 29323 - protein, 13 aa, synthetic construct
CAVPRWGNEKLTF

SEQ ID NO: 29324 - protein, 11 aa, synthetic construct
CALFNTDKLIF

SEQ ID NO: 29325 - protein, 15 aa, synthetic construct
CAASSSGGSNYKLTF

SEQ ID NO: 29326 - protein, 11 aa, synthetic construct
CAVRYGQNFVF

SEQ ID NO: 29327 - protein, 16 aa, synthetic construct
CAGVPAGGTSYGKLTF

SEQ ID NO: 29328 - protein, 11 aa, synthetic construct
CAAHSGTALIF

SEQ ID NO: 29329 - protein, 16 aa, synthetic construct
CALSEAWKSSGDKLTF

SEQ ID NO: 29330 - protein, 15 aa, synthetic construct
CVVSEGPGGSYIPTF

SEQ ID NO: 29331 - protein, 17 aa, synthetic construct
CAFHQILHGGSNYKLTF

SEQ ID NO: 29332 - protein, 13 aa, synthetic construct
CALSDYNTDKLIF

SEQ ID NO: 29333 - protein, 16 aa, synthetic construct
CGTEEGPGGGADGLTF

SEQ ID NO: 29334 - protein, 15 aa, synthetic construct
CAEADSYNQGGKLIF

SEQ ID NO: 29335 - protein, 12 aa, synthetic construct
CAFTYNFNKFYF

SEQ ID NO: 29336 - protein, 12 aa, synthetic construct
CAENDQGGKLIF

SEQ ID NO: 29337 - protein, 12 aa, synthetic construct
CILSWNNNDMRF

SEQ ID NO: 29338 - protein, 13 aa, synthetic construct
CATDVAAGNKLTF

SEQ ID NO: 29339 - protein, 11 aa, synthetic construct
CAELGGQNFVF

SEQ ID NO: 29340 - protein, 13 aa, synthetic construct
CAFKSGGSYIPTF

SEQ ID NO: 29341 - protein, 15 aa, synthetic construct
CVVTGGAEYGNKLVF

SEQ ID NO: 29342 - protein, 14 aa, synthetic construct
CAEAHMNRDDKIIF

SEQ ID NO: 29343 - protein, 14 aa, synthetic construct
CAEITAGGNTPLVF

SEQ ID NO: 29344 - protein, 13 aa, synthetic construct
CAFLSGGSYIPTF

SEQ ID NO: 29345 - protein, 12 aa, synthetic construct
CAPGRGSYIPTF

SEQ ID NO: 29346 - protein, 15 aa, synthetic construct
CGADGRDNYGQNFVF

SEQ ID NO: 29347 - protein, 14 aa, synthetic construct
CALSEAGSARQLTF

SEQ ID NO: 29348 - protein, 11 aa, synthetic construct
CVVIRDARLMF

SEQ ID NO: 29349 - protein, 12 aa, synthetic construct
CASLKGNNDMRF

SEQ ID NO: 29350 - protein, 14 aa, synthetic construct
CAPGNKGGANNLFF

SEQ ID NO: 29351 - protein, 12 aa, synthetic construct
CATDFPGNMLTF

SEQ ID NO: 29352 - protein, 13 aa, synthetic construct
CAASGVGGNKLVF

SEQ ID NO: 29353 - protein, 15 aa, synthetic construct
CAFMARGSTLGRLYF

SEQ ID NO: 29354 - protein, 12 aa, synthetic construct
CAVTGRVQKLVF

SEQ ID NO: 29355 - protein, 12 aa, synthetic construct
CALKRAGNMLTF

SEQ ID NO: 29356 - protein, 13 aa, synthetic construct
CAGEVNRDDKIIF

SEQ ID NO: 29357 - protein, 15 aa, synthetic construct
CVVNNWGTGGFKTIF

SEQ ID NO: 29358 - protein, 11 aa, synthetic construct
CALSGYSTLTF

SEQ ID NO: 29359 - protein, 13 aa, synthetic construct
CAGVLGYGQNFVF

SEQ ID NO: 29360 - protein, 11 aa, synthetic construct
CATIGYSTLTF

SEQ ID NO: 29361 - protein, 15 aa, synthetic construct
CAVGATGAGSYQLTF

SEQ ID NO: 29362 - protein, 13 aa, synthetic construct
CAVRLNRDDKIIF

SEQ ID NO: 29363 - protein, 14 aa, synthetic construct
CATQTQGGSEKLVF

SEQ ID NO: 29364 - protein, 13 aa, synthetic construct
CIPSPYNNNDMRF

SEQ ID NO: 29365 - protein, 13 aa, synthetic construct
CAMRGGSARQLTF

SEQ ID NO: 29366 - protein, 14 aa, synthetic construct
CARPLGTGGFKTIF

SEQ ID NO: 29367 - protein, 12 aa, synthetic construct
CATDEGFQKLVF

SEQ ID NO: 29368 - protein, 9 aa, synthetic construct
CAGGNMLTF

SEQ ID NO: 29369 - protein, 12 aa, synthetic construct
CARTDSWGKLQF

SEQ ID NO: 29370 - protein, 14 aa, synthetic construct
CALSGSSGNTPLVF

SEQ ID NO: 29371 - protein, 14 aa, synthetic construct
CAVRTTSGTYKYIF

SEQ ID NO: 29372 - protein, 14 aa, synthetic construct
CAAVANFGNEKLTF

SEQ ID NO: 29373 - protein, 12 aa, synthetic construct
CAMVGGSYIPTF

SEQ ID NO: 29374 - protein, 15 aa, synthetic construct
CGTEIVSGTASKLTF

SEQ ID NO: 29375 - protein, 11 aa, synthetic construct
CAMRGYSTLTF

SEQ ID NO: 29376 - protein, 14 aa, synthetic construct
CAGISSGSARQLTF

SEQ ID NO: 29377 - protein, 12 aa, synthetic construct
CAVLNNGNMLTF

SEQ ID NO: 29378 - protein, 14 aa, synthetic construct
CAVRGQGGSEKLVF

SEQ ID NO: 29379 - protein, 11 aa, synthetic construct
CARGSASKIIF

SEQ ID NO: 29380 - protein, 13 aa, synthetic construct
CAVLMDSNYQLIW

SEQ ID NO: 29381 - protein, 11 aa, synthetic construct
CAVNRDDKIIF

SEQ ID NO: 29382 - protein, 13 aa, synthetic construct
CAASGQAGTALIF

SEQ ID NO: 29383 - protein, 9 aa, synthetic construct
CAEEDRLMF

SEQ ID NO: 29384 - protein, 12 aa, synthetic construct
CALNQAGTALIF

SEQ ID NO: 29385 - protein, 14 aa, synthetic construct
CVVNVGNYGQNFVF

SEQ ID NO: 29386 - protein, 17 aa, synthetic construct
CAYRSLPIKAAGNKLTF

SEQ ID NO: 29387 - protein, 11 aa, synthetic construct
CAAQAGQNFVF

SEQ ID NO: 29388 - protein, 18 aa, synthetic construct
CLVGDMGAGGTSYGKLTF

SEQ ID NO: 29389 - protein, 13 aa, synthetic construct
CAVSMDSSYKLIF

SEQ ID NO: 29390 - protein, 14 aa, synthetic construct
CVVNNWSGANNLFF

SEQ ID NO: 29391 - protein, 14 aa, synthetic construct
CAVSDPYTGNQFYF

SEQ ID NO: 29392 - protein, 16 aa, synthetic construct
CAVRDRVTSGTYKYIF

SEQ ID NO: 29393 - protein, 11 aa, synthetic construct
CAENRYSTLTF

SEQ ID NO: 29394 - protein, 12 aa, synthetic construct
CAVNQGNTPLVF

SEQ ID NO: 29395 - protein, 14 aa, synthetic construct
CAVRENQAGTALIF

SEQ ID NO: 29396 - protein, 14 aa, synthetic construct
CAVDRSNSGYALNF

SEQ ID NO: 29397 - protein, 14 aa, synthetic construct
CAGKRLYGSEKLVF

SEQ ID NO: 29398 - protein, 16 aa, synthetic construct
CAYRSSIPYNTDKLIF

SEQ ID NO: 29399 - protein, 15 aa, synthetic construct
CATQNSGAGSYQLTF

SEQ ID NO: 29400 - protein, 11 aa, synthetic construct
CAAHNFNKFYF

SEQ ID NO: 29401 - protein, 13 aa, synthetic construct
CAVFEGGTYKYIF

SEQ ID NO: 29402 - protein, 14 aa, synthetic construct
CAVGLDNYGQNFVF

SEQ ID NO: 29403 - protein, 14 aa, synthetic construct
CAVRDRQAGTALIF

SEQ ID NO: 29404 - protein, 14 aa, synthetic construct
CAASSKDSNYQLIW

SEQ ID NO: 29405 - protein, 15 aa, synthetic construct
CAALNSGGGADGLTF

SEQ ID NO: 29406 - protein, 13 aa, synthetic construct
CAGETSGTYKYIF

SEQ ID NO: 29407 - protein, 12 aa, synthetic construct
CAMREGRVRLMF

SEQ ID NO: 29408 - protein, 15 aa, synthetic construct
CAATPSGGGADGLTF

SEQ ID NO: 29409 - protein, 15 aa, synthetic construct
CAGPPLKAAGNKLTF

SEQ ID NO: 29410 - protein, 13 aa, synthetic construct
CAAQGGGYQKVTF

SEQ ID NO: 29411 - protein, 17 aa, synthetic construct
CAVNWDHSGGGADGLTF

SEQ ID NO: 29412 - protein, 18 aa, synthetic construct
CAVTVPDAGGTSYGKLTF

SEQ ID NO: 29413 - protein, 11 aa, synthetic construct
CVVNNDYKLSF

SEQ ID NO: 29414 - protein, 15 aa, synthetic construct
CAMREPSGANSKLTF

SEQ ID NO: 29415 - protein, 11 aa, synthetic construct
CAESILNDMRF

SEQ ID NO: 29416 - protein, 14 aa, synthetic construct
CAVNRGDSNYQLIW

SEQ ID NO: 29417 - protein, 13 aa, synthetic construct
CAVNGGANSKLTF

SEQ ID NO: 29418 - protein, 15 aa, synthetic construct
CAATPRMDSSYKLIF

SEQ ID NO: 29419 - protein, 16 aa, synthetic construct
CILRADLYNQGGKLIF

SEQ ID NO: 29420 - protein, 14 aa, synthetic construct
CAELNTGTASKLTF

SEQ ID NO: 29421 - protein, 14 aa, synthetic construct
CLVGVRSNDYKLSF

SEQ ID NO: 29422 - protein, 13 aa, synthetic construct
CAGIGSGTYKYIF

SEQ ID NO: 29423 - protein, 10 aa, synthetic construct
CAGGGFKTIF

SEQ ID NO: 29424 - protein, 13 aa, synthetic construct
CAVFMDSNYQLIW

SEQ ID NO: 29425 - protein, 16 aa, synthetic construct
CAYRSAGGSGNTPLVF

SEQ ID NO: 29426 - protein, 13 aa, synthetic construct
CAAGRSGTYKYIF

SEQ ID NO: 29427 - protein, 18 aa, synthetic construct
CILRRTGNYGGSQGNLIF

SEQ ID NO: 29428 - protein, 15 aa, synthetic construct
CVVSPWTGSQGNLIF

SEQ ID NO: 29429 - protein, 13 aa, synthetic construct
CAVNGQAGTALIF

SEQ ID NO: 29430 - protein, 17 aa, synthetic construct
CATVSADRGSTLGRLYF

SEQ ID NO: 29431 - protein, 13 aa, synthetic construct
CAADGGGADGLTF

SEQ ID NO: 29432 - protein, 13 aa, synthetic construct
CAVNRGRDDKIIF

SEQ ID NO: 29433 - protein, 13 aa, synthetic construct
CAVGYSSASKIIF

SEQ ID NO: 29434 - protein, 12 aa, synthetic construct
CAVAPRGGKSTF

SEQ ID NO: 29435 - protein, 14 aa, synthetic construct
CAVNGMDSSYKLIF

SEQ ID NO: 29436 - protein, 15 aa, synthetic construct
CGADLQTDSWGKLQF

SEQ ID NO: 29437 - protein, 15 aa, synthetic construct
CVVSDGTGGYNKLIF

SEQ ID NO: 29438 - protein, 15 aa, synthetic construct
CAVRDMDTGGFKTIF

SEQ ID NO: 29439 - protein, 11 aa, synthetic construct
CAMKAGTALIF

SEQ ID NO: 29440 - protein, 14 aa, synthetic construct
CAESYNTGGFKTIF

SEQ ID NO: 29441 - protein, 15 aa, synthetic construct
CVVNPRASSASKIIF

SEQ ID NO: 29442 - protein, 11 aa, synthetic construct
CAVPHDYKLSF

SEQ ID NO: 29443 - protein, 12 aa, synthetic construct
CAVRDSNYQLIW

SEQ ID NO: 29444 - protein, 15 aa, synthetic construct
CAVRDMRDYGQNFVF

SEQ ID NO: 29445 - protein, 13 aa, synthetic construct
CAPLEQAGTALIF

SEQ ID NO: 29446 - protein, 13 aa, synthetic construct
CAVPQTGANNLFF

SEQ ID NO: 29447 - protein, 12 aa, synthetic construct
CAVGDNFNKFYF

SEQ ID NO: 29448 - protein, 13 aa, synthetic construct
CALGGTSYGKLTF

SEQ ID NO: 29449 - protein, 13 aa, synthetic construct
CASDNQAGTALIF

SEQ ID NO: 29450 - protein, 14 aa, synthetic construct
CAVRGLNYGQNFVF

SEQ ID NO: 29451 - protein, 13 aa, synthetic construct
CAGNTGTASKLTF

SEQ ID NO: 29452 - protein, 14 aa, synthetic construct
CAGAVGGSQGNLIF

SEQ ID NO: 29453 - protein, 12 aa, synthetic construct
CVVNIYDYKLSF

SEQ ID NO: 29454 - protein, 15 aa, synthetic construct
CAATLFSGGYNKLIF

SEQ ID NO: 29455 - protein, 11 aa, synthetic construct
CALRGGNRLMF

SEQ ID NO: 29456 - protein, 13 aa, synthetic construct
CAVLTGGGNKLTF

SEQ ID NO: 29457 - protein, 12 aa, synthetic construct
CAVPSSASKIIF

SEQ ID NO: 29458 - protein, 12 aa, synthetic construct
CAVMDSSYKLIF

SEQ ID NO: 29459 - protein, 12 aa, synthetic construct
CVVMNRDDKIIF

SEQ ID NO: 29460 - protein, 13 aa, synthetic construct
CAATSGGSYIPTF

SEQ ID NO: 29461 - protein, 12 aa, synthetic construct
CALPNTGNQFYF

SEQ ID NO: 29462 - protein, 15 aa, synthetic construct
CAVNSGYSSASKIIF

SEQ ID NO: 29463 - protein, 15 aa, synthetic construct
CAAIRNTGTASKLTF

SEQ ID NO: 29464 - protein, 13 aa, synthetic construct
CAVKGGGGFKTIF

SEQ ID NO: 29465 - protein, 13 aa, synthetic construct
CAVMAFGNEKLTF

SEQ ID NO: 29466 - protein, 11 aa, synthetic construct
CAVRHGQNFVF

SEQ ID NO: 29467 - protein, 13 aa, synthetic construct
CAGRGTSYDKVIF

SEQ ID NO: 29468 - protein, 16 aa, synthetic construct
CALKGSSSGSARQLTF

SEQ ID NO: 29469 - protein, 17 aa, synthetic construct
CALSPSPIKAAGNKLTF

SEQ ID NO: 29470 - protein, 11 aa, synthetic construct
CAENSDYKLSF

SEQ ID NO: 29471 - protein, 13 aa, synthetic construct
CAVRFSNDYKLSF

SEQ ID NO: 29472 - protein, 13 aa, synthetic construct
CAATSTNDYKLSF

SEQ ID NO: 29473 - protein, 14 aa, synthetic construct
CAVGSLYNFNKFYF

SEQ ID NO: 29474 - protein, 15 aa, synthetic construct
CAASAAGAGSYQLTF

SEQ ID NO: 29475 - protein, 15 aa, synthetic construct
CAFRSGGTSYGKLTF

SEQ ID NO: 29476 - protein, 14 aa, synthetic construct
CVVNPYNQGGKLIF

SEQ ID NO: 29477 - protein, 15 aa, synthetic construct
CAVHLPSGGSYIPTF

SEQ ID NO: 29478 - protein, 15 aa, synthetic construct
CAVNEGYFGNEKLTF

SEQ ID NO: 29479 - protein, 14 aa, synthetic construct
CALSEDSGNTPLVF

SEQ ID NO: 29480 - protein, 12 aa, synthetic construct
CGTNQAGTALIF

SEQ ID NO: 29481 - protein, 14 aa, synthetic construct
CAENNPNSGYALNF

SEQ ID NO: 29482 - protein, 14 aa, synthetic construct
CALPAQGGSEKLVF

SEQ ID NO: 29483 - protein, 13 aa, synthetic construct
CAASYEGFQKLVF

SEQ ID NO: 29484 - protein, 13 aa, synthetic construct
CAYRMEYGNKLVF

SEQ ID NO: 29485 - protein, 12 aa, synthetic construct
CATVGGSYIPTF

SEQ ID NO: 29486 - protein, 16 aa, synthetic construct
CLVGDQVPGGYQKVTF

SEQ ID NO: 29487 - protein, 15 aa, synthetic construct
CALSPPNQAGTALIF

SEQ ID NO: 29488 - protein, 13 aa, synthetic construct
CATAPGGGFKTIF

SEQ ID NO: 29489 - protein, 12 aa, synthetic construct
CAVKDSNYQLIW

SEQ ID NO: 29490 - protein, 16 aa, synthetic construct
CAFMNPIYNQGGKLIF

SEQ ID NO: 29491 - protein, 15 aa, synthetic construct
CAARSGGTSYGKLTF

SEQ ID NO: 29492 - protein, 16 aa, synthetic construct
CAVRFITQGGSEKLVF

SEQ ID NO: 29493 - protein, 14 aa, synthetic construct
CIVRVANQGGKLIF

SEQ ID NO: 29494 - protein, 12 aa, synthetic construct
CAERTDGQKLLF

SEQ ID NO: 29495 - protein, 16 aa, synthetic construct
CVVSAYWMAGANNLFF

SEQ ID NO: 29496 - protein, 12 aa, synthetic construct
CAENTGGFKTIF

SEQ ID NO: 29497 - protein, 11 aa, synthetic construct
CALGWANNLFF

SEQ ID NO: 29498 - protein, 11 aa, synthetic construct
CARNTGNQFYF

SEQ ID NO: 29499 - protein, 13 aa, synthetic construct
CVVSEKPGQNFVF

SEQ ID NO: 29500 - protein, 16 aa, synthetic construct
CAMRESGGTSYGKLTF

SEQ ID NO: 29501 - protein, 14 aa, synthetic construct
CALTPGRATNKLIF

SEQ ID NO: 29502 - protein, 14 aa, synthetic construct
CARSPPNRDDKIIF

SEQ ID NO: 29503 - protein, 16 aa, synthetic construct
CAVTDAYGGSQGNLIF

SEQ ID NO: 29504 - protein, 13 aa, synthetic construct
CAVRKDSSYKLIF

SEQ ID NO: 29505 - protein, 10 aa, synthetic construct
CVVRDYKLSF

SEQ ID NO: 29506 - protein, 14 aa, synthetic construct
CAYRPDSGTYKYIF

SEQ ID NO: 29507 - protein, 12 aa, synthetic construct
CAGTGGGNKLTF

SEQ ID NO: 29508 - protein, 11 aa, synthetic construct
CIRDNNNDMRF

SEQ ID NO: 29509 - protein, 11 aa, synthetic construct
CAASWNNRLMF

SEQ ID NO: 29510 - protein, 13 aa, synthetic construct
CIAADSGYSTLTF

SEQ ID NO: 29511 - protein, 14 aa, synthetic construct
CALSDRGSQGNLIF

SEQ ID NO: 29512 - protein, 12 aa, synthetic construct
CVVILGANNLFF

SEQ ID NO: 29513 - protein, 12 aa, synthetic construct
CALSGNTGKSTF

SEQ ID NO: 29514 - protein, 16 aa, synthetic construct
CAEIPNYGGSQGNLIF

SEQ ID NO: 29515 - protein, 18 aa, synthetic construct
CAVNRGRDSGAGSYQLTF

SEQ ID NO: 29516 - protein, 12 aa, synthetic construct
CAYWDNTDKLIF

SEQ ID NO: 29517 - protein, 13 aa, synthetic construct
CAVRSSNTGKLIF

SEQ ID NO: 29518 - protein, 14 aa, synthetic construct
CAASSPTGGFKTIF

SEQ ID NO: 29519 - protein, 15 aa, synthetic construct
CILRDGGGATNKLIF

SEQ ID NO: 29520 - protein, 11 aa, synthetic construct
CAVKGYSTLTF

SEQ ID NO: 29521 - protein, 15 aa, synthetic construct
CAVNPGSSGYSTLTF

SEQ ID NO: 29522 - protein, 13 aa, synthetic construct
CAFPSGSARQLTF

SEQ ID NO: 29523 - protein, 12 aa, synthetic construct
CAQAGGSYIPTF

SEQ ID NO: 29524 - protein, 13 aa, synthetic construct
CAGTLSNDYKLSF

SEQ ID NO: 29525 - protein, 11 aa, synthetic construct
CAASIAGKSTF

SEQ ID NO: 29526 - protein, 10 aa, synthetic construct
CAVYGNMLTF

SEQ ID NO: 29527 - protein, 14 aa, synthetic construct
CAVRSGGSNYKLTF

SEQ ID NO: 29528 - protein, 15 aa, synthetic construct
CAVRARGSTLGRLYF

SEQ ID NO: 29529 - protein, 9 aa, synthetic construct
CAEDSRLMF

SEQ ID NO: 29530 - protein, 10 aa, synthetic construct
CAGNGNMLTF

SEQ ID NO: 29531 - protein, 14 aa, synthetic construct
CAERTETSYDKVIF

SEQ ID NO: 29532 - protein, 12 aa, synthetic construct
CAAPRNTDKLIF

SEQ ID NO: 29533 - protein, 13 aa, synthetic construct
CAESFPYGNKLVF

SEQ ID NO: 29534 - protein, 15 aa, synthetic construct
CAASGSQGGSEKLVF

SEQ ID NO: 29535 - protein, 10 aa, synthetic construct
CAAHTDKLIF

SEQ ID NO: 29536 - protein, 14 aa, synthetic construct
CAADSGGSNYKLTF

SEQ ID NO: 29537 - protein, 16 aa, synthetic construct
CAASSDWGAGSYQLTF

SEQ ID NO: 29538 - protein, 15 aa, synthetic construct
CAFMNPTSGTYKYIF

SEQ ID NO: 29539 - protein, 14 aa, synthetic construct
CAASDQGGSEKLVF

SEQ ID NO: 29540 - protein, 9 aa, synthetic construct
CAEGNRLMF

SEQ ID NO: 29541 - protein, 11 aa, synthetic construct
CLMEYGNKLVF

SEQ ID NO: 29542 - protein, 17 aa, synthetic construct
CAENMGGSGGSNYKLTF

SEQ ID NO: 29543 - protein, 16 aa, synthetic construct
CAVSDLRDTGRRALTF

SEQ ID NO: 29544 - protein, 14 aa, synthetic construct
CVVNFGGGGNKLTF

SEQ ID NO: 29545 - protein, 12 aa, synthetic construct
CAAGGSQGNLIF

SEQ ID NO: 29546 - protein, 12 aa, synthetic construct
CAGPGTASKLTF

SEQ ID NO: 29547 - protein, 11 aa, synthetic construct
CSVYNFNKFYF

SEQ ID NO: 29548 - protein, 15 aa, synthetic construct
CALSEGIGSARQLTF

SEQ ID NO: 29549 - protein, 12 aa, synthetic construct
CAVKGGSYIPTF

SEQ ID NO: 29550 - protein, 16 aa, synthetic construct
CAVLFPGYSSASKIIF

SEQ ID NO: 29551 - protein, 15 aa, synthetic construct
CANHLPQGGSEKLVF

SEQ ID NO: 29552 - protein, 14 aa, synthetic construct
CAEPSGAGSYQLTF

SEQ ID NO: 29553 - protein, 15 aa, synthetic construct
CALSDNGSSASKIIF

SEQ ID NO: 29554 - protein, 13 aa, synthetic construct
CAAGYNQGGKLIF

SEQ ID NO: 29555 - protein, 11 aa, synthetic construct
CAVWVSGDMRF

SEQ ID NO: 29556 - protein, 12 aa, synthetic construct
CAVTTSYGKLTF

SEQ ID NO: 29557 - protein, 16 aa, synthetic construct
CAMRESLNSGYSTLTF

SEQ ID NO: 29558 - protein, 11 aa, synthetic construct
CAEDPDARLMF

SEQ ID NO: 29559 - protein, 15 aa, synthetic construct
CAVSDRAGTASKLTF

SEQ ID NO: 29560 - protein, 11 aa, synthetic construct
CAARGGNMLTF

SEQ ID NO: 29561 - protein, 13 aa, synthetic construct
CATVDFGNEKLTF

SEQ ID NO: 29562 - protein, 15 aa, synthetic construct
CLVGSTGGSQGNLIF

SEQ ID NO: 29563 - protein, 11 aa, synthetic construct
CASRGDYKLSF

SEQ ID NO: 29564 - protein, 11 aa, synthetic construct
CAMKRDDKIIF

SEQ ID NO: 29565 - protein, 12 aa, synthetic construct
CAVKDNNNDMRF

SEQ ID NO: 29566 - protein, 14 aa, synthetic construct
CATVPNSGNTPLVF

SEQ ID NO: 29567 - protein, 16 aa, synthetic construct
CILRAAGGTSYGKLTF

SEQ ID NO: 29568 - protein, 14 aa, synthetic construct
CIVRVPNRDDKIIF

SEQ ID NO: 29569 - protein, 11 aa, synthetic construct
CGTASFNDMRF

SEQ ID NO: 29570 - protein, 14 aa, synthetic construct
CALSCDFGNEKLTF

SEQ ID NO: 29571 - protein, 15 aa, synthetic construct
CAVQASKDSNYQLIW

SEQ ID NO: 29572 - protein, 12 aa, synthetic construct
CALDPNDYKLSF

SEQ ID NO: 29573 - protein, 13 aa, synthetic construct
CAASLFNGNMLTF

SEQ ID NO: 29574 - protein, 12 aa, synthetic construct
CAFCYNNNDMRF

SEQ ID NO: 29575 - protein, 14 aa, synthetic construct
CALIENTGGFKTIF

SEQ ID NO: 29576 - protein, 15 aa, synthetic construct
CAVNYPSGSARQLTF

SEQ ID NO: 29577 - protein, 12 aa, synthetic construct
CATDAGDDKIIF

SEQ ID NO: 29578 - protein, 14 aa, synthetic construct
CAVTLLSDGQKLLF

SEQ ID NO: 29579 - protein, 15 aa, synthetic construct
CARQPEGNQGGKLIF

SEQ ID NO: 29580 - protein, 15 aa, synthetic construct
CVVNGAVFGNEKLTF

SEQ ID NO: 29581 - protein, 16 aa, synthetic construct
CAVKGAGGTSYGKLTF

SEQ ID NO: 29582 - protein, 10 aa, synthetic construct
CVVNGQKVTF

SEQ ID NO: 29583 - protein, 16 aa, synthetic construct
CAVVPLIKAAGNKLTF

SEQ ID NO: 29584 - protein, 12 aa, synthetic construct
CASGGSQGNLIF

SEQ ID NO: 29585 - protein, 18 aa, synthetic construct
CAVGAYLYSGGGADGLTF

SEQ ID NO: 29586 - protein, 16 aa, synthetic construct
CATDADSGGGADGLTF

SEQ ID NO: 29587 - protein, 12 aa, synthetic construct
CAGPQGNTPLVF

SEQ ID NO: 29588 - protein, 13 aa, synthetic construct
CAGVDFGNEKLTF

SEQ ID NO: 29589 - protein, 12 aa, synthetic construct
CAVIPRNNDMRF

SEQ ID NO: 29590 - protein, 12 aa, synthetic construct
CAGGGSQGNLIF

SEQ ID NO: 29591 - protein, 13 aa, synthetic construct
CALMRGGSEKLVF

SEQ ID NO: 29592 - protein, 15 aa, synthetic construct
CAASDRGSTLGRLYF

SEQ ID NO: 29593 - protein, 12 aa, synthetic construct
CAVSERTDKLIF

SEQ ID NO: 29594 - protein, 15 aa, synthetic construct
CIVRGSSSNTGKLIF

SEQ ID NO: 29595 - protein, 13 aa, synthetic construct
CAVGYNQGGKLIF

SEQ ID NO: 29596 - protein, 13 aa, synthetic construct
CAFTHNYGQNFVF

SEQ ID NO: 29597 - protein, 13 aa, synthetic construct
CAVMDTGRRALTF

SEQ ID NO: 29598 - protein, 12 aa, synthetic construct
CAEEGSNYKLTF

SEQ ID NO: 29599 - protein, 13 aa, synthetic construct
CAASMEYGNKLVF

SEQ ID NO: 29600 - protein, 16 aa, synthetic construct
CVVRGGSGGGADGLTF

SEQ ID NO: 29601 - protein, 10 aa, synthetic construct
CARDGQKLLF

SEQ ID NO: 29602 - protein, 14 aa, synthetic construct
CALRTGGSNYKLTF

SEQ ID NO: 29603 - protein, 13 aa, synthetic construct
CAVRDMSHSTLTF

SEQ ID NO: 29604 - protein, 12 aa, synthetic construct
CVVKTSYDKVIF

SEQ ID NO: 29605 - protein, 12 aa, synthetic construct
CAVKNNTDKLIF

SEQ ID NO: 29606 - protein, 15 aa, synthetic construct
CAYIHPGNSGYALNF

SEQ ID NO: 29607 - protein, 13 aa, synthetic construct
CAFPSGGSYIPTF

SEQ ID NO: 29608 - protein, 15 aa, synthetic construct
CAVKNYGGATNKLIF

SEQ ID NO: 29609 - protein, 15 aa, synthetic construct
CAVRDNDNYGQNFVF

SEQ ID NO: 29610 - protein, 14 aa, synthetic construct
CAVVGGSGTYKYIF

SEQ ID NO: 29611 - protein, 11 aa, synthetic construct
CGGGSNYKLTF

SEQ ID NO: 29612 - protein, 14 aa, synthetic construct
CAVDKIQGAQKLVF

SEQ ID NO: 29613 - protein, 13 aa, synthetic construct
CALTSSNTGKLIF

SEQ ID NO: 29614 - protein, 12 aa, synthetic construct
CAVRDRGYQLIW

SEQ ID NO: 29615 - protein, 14 aa, synthetic construct
CAGGGRGGGNKLTF

SEQ ID NO: 29616 - protein, 13 aa, synthetic construct
CAPNGGSQGNLIF

SEQ ID NO: 29617 - protein, 16 aa, synthetic construct
CAFILDYGGATNKLIF

SEQ ID NO: 29618 - protein, 15 aa, synthetic construct
CALSVSSGSARQLTF

SEQ ID NO: 29619 - protein, 13 aa, synthetic construct
CAEIVTGANNLFF

SEQ ID NO: 29620 - protein, 14 aa, synthetic construct
CAEMAGGGADGLTF

SEQ ID NO: 29621 - protein, 15 aa, synthetic construct
CAEKAGISDGQKLLF

SEQ ID NO: 29622 - protein, 14 aa, synthetic construct
CAASPRDFGNVLHC

SEQ ID NO: 29623 - protein, 13 aa, synthetic construct
CALSDRGNEKLTF

SEQ ID NO: 29624 - protein, 11 aa, synthetic construct
CAVGEVDRLMF

SEQ ID NO: 29625 - protein, 17 aa, synthetic construct
CAVQAAHGSSNTGKLIF

SEQ ID NO: 29626 - protein, 14 aa, synthetic construct
CATEGGSGYSTLTF

SEQ ID NO: 29627 - protein, 16 aa, synthetic construct
CALSEAFYNQGGKLIF

SEQ ID NO: 29628 - protein, 13 aa, synthetic construct
CAVEETSGSRLTF

SEQ ID NO: 29629 - protein, 14 aa, synthetic construct
CATDFYSSASKIIF

SEQ ID NO: 29630 - protein, 14 aa, synthetic construct
CAGLASSNDYKLSF

SEQ ID NO: 29631 - protein, 10 aa, synthetic construct
CAESVGKLIF

SEQ ID NO: 29632 - protein, 14 aa, synthetic construct
CASSYSIGNQPQHF

SEQ ID NO: 29633 - protein, 12 aa, synthetic construct
CASSGGNGELFF

SEQ ID NO: 29634 - protein, 14 aa, synthetic construct
CASSGQGANTEAFF

SEQ ID NO: 29635 - protein, 12 aa, synthetic construct
CASSWGSYEQYF

SEQ ID NO: 29636 - protein, 12 aa, synthetic construct
CASGQGNTEAFF

SEQ ID NO: 29637 - protein, 14 aa, synthetic construct
CASSLAGNNQPQHF

SEQ ID NO: 29638 - protein, 11 aa, synthetic construct
CASRQGYEQYF

SEQ ID NO: 29639 - protein, 13 aa, synthetic construct
CASSLGRNYGYTF

SEQ ID NO: 29640 - protein, 13 aa, synthetic construct
CASSLVNTGELFF

SEQ ID NO: 29641 - protein, 13 aa, synthetic construct
CASSSRRGHGYTF

SEQ ID NO: 29642 - protein, 15 aa, synthetic construct
CASSLGGGPQETQYF

SEQ ID NO: 29643 - protein, 13 aa, synthetic construct
CASSLRGVDEQFF

SEQ ID NO: 29644 - protein, 12 aa, synthetic construct
CASSLGYNEQFF

SEQ ID NO: 29645 - protein, 14 aa, synthetic construct
CASSLRSGSDTQYF

SEQ ID NO: 29646 - protein, 14 aa, synthetic construct
CSVGTGGTNEKLFF

SEQ ID NO: 29647 - protein, 12 aa, synthetic construct
CSVGSGDYEQYF

SEQ ID NO: 29648 - protein, 13 aa, synthetic construct
CASSLARGYEQYF

SEQ ID NO: 29649 - protein, 13 aa, synthetic construct
CASSVGQAYEQYF

SEQ ID NO: 29650 - protein, 13 aa, synthetic construct
CASSLGQAYEQYF

SEQ ID NO: 29651 - protein, 16 aa, synthetic construct
CSARDRGTENTGELFF

SEQ ID NO: 29652 - protein, 14 aa, synthetic construct
CASSQETGSYEQYF

SEQ ID NO: 29653 - protein, 12 aa, synthetic construct
CASSSLNTEAFF

SEQ ID NO: 29654 - protein, 14 aa, synthetic construct
CASSFLAGTDTQYF

SEQ ID NO: 29655 - protein, 14 aa, synthetic construct
CASSVQGANYGYTF

SEQ ID NO: 29656 - protein, 14 aa, synthetic construct
CASSYPLGGYGYTF

SEQ ID NO: 29657 - protein, 16 aa, synthetic construct
CASSTGQLSNTGELFF

SEQ ID NO: 29658 - protein, 13 aa, synthetic construct
CASSSDSSYEQYF

SEQ ID NO: 29659 - protein, 13 aa, synthetic construct
CSARTGVGNTIYF

SEQ ID NO: 29660 - protein, 14 aa, synthetic construct
CASSLSGPLETQYF

SEQ ID NO: 29661 - protein, 15 aa, synthetic construct
CASSPLLGGNQPQHF

SEQ ID NO: 29662 - protein, 13 aa, synthetic construct
CSARDGTGNGYTF

SEQ ID NO: 29663 - protein, 14 aa, synthetic construct
CASSPRDHQETQYF

SEQ ID NO: 29664 - protein, 12 aa, synthetic construct
CASSLGAYEQYF

SEQ ID NO: 29665 - protein, 12 aa, synthetic construct
CASSYRGTEAFF

SEQ ID NO: 29666 - protein, 12 aa, synthetic construct
CASSLGTQPQHF

SEQ ID NO: 29667 - protein, 12 aa, synthetic construct
CSVGAGDYEQYF

SEQ ID NO: 29668 - protein, 11 aa, synthetic construct
CASSFRETQYF

SEQ ID NO: 29669 - protein, 14 aa, synthetic construct
CASSPGTGYYEQYF

SEQ ID NO: 29670 - protein, 13 aa, synthetic construct
CSVGSGEGYEQYF

SEQ ID NO: 29671 - protein, 11 aa, synthetic construct
CASSLGETQYF

SEQ ID NO: 29672 - protein, 15 aa, synthetic construct
CASSPTSGEYNEQFF

SEQ ID NO: 29673 - protein, 13 aa, synthetic construct
CASSLDSSYEQYF

SEQ ID NO: 29674 - protein, 11 aa, synthetic construct
CASSRGTEAFF

SEQ ID NO: 29675 - protein, 11 aa, synthetic construct
CASSQGVGYTF

SEQ ID NO: 29676 - protein, 13 aa, synthetic construct
CASSVGPGNTIYF

SEQ ID NO: 29677 - protein, 12 aa, synthetic construct
CSVGQGPYEQYF

SEQ ID NO: 29678 - protein, 12 aa, synthetic construct
CASSLDAETQYF

SEQ ID NO: 29679 - protein, 13 aa, synthetic construct
CASSFGVNTEAFF

SEQ ID NO: 29680 - protein, 13 aa, synthetic construct
CASSGGSTDTQYF

SEQ ID NO: 29681 - protein, 15 aa, synthetic construct
CASSPTSGSIYEQYF

SEQ ID NO: 29682 - protein, 14 aa, synthetic construct
CASSDRAGTDTQYF

SEQ ID NO: 29683 - protein, 14 aa, synthetic construct
CASSLAGEGYEQYF

SEQ ID NO: 29684 - protein, 13 aa, synthetic construct
CASSLEGDQPQHF

SEQ ID NO: 29685 - protein, 13 aa, synthetic construct
CASSSQRNTEAFF

SEQ ID NO: 29686 - protein, 13 aa, synthetic construct
CASSRLSNQPQHF

SEQ ID NO: 29687 - protein, 15 aa, synthetic construct
CSVEATGGLYNEQFF

SEQ ID NO: 29688 - protein, 13 aa, synthetic construct
CASSLLTGHEQFF

SEQ ID NO: 29689 - protein, 13 aa, synthetic construct
CASSLTSMETQYF

SEQ ID NO: 29690 - protein, 15 aa, synthetic construct
CAWSAAGRYTGELFF

SEQ ID NO: 29691 - protein, 16 aa, synthetic construct
CASSAPDWGGADTQYF

SEQ ID NO: 29692 - protein, 16 aa, synthetic construct
CASSPTLQGYADEAFF

SEQ ID NO: 29693 - protein, 14 aa, synthetic construct
CASSRETGDQPQHF

SEQ ID NO: 29694 - protein, 13 aa, synthetic construct
CASSQEPETEAFF

SEQ ID NO: 29695 - protein, 14 aa, synthetic construct
CASSFMRADTEAFF

SEQ ID NO: 29696 - protein, 15 aa, synthetic construct
CASSQLADLSYEQYF

SEQ ID NO: 29697 - protein, 14 aa, synthetic construct
CASTPTGLDQPQHF

SEQ ID NO: 29698 - protein, 17 aa, synthetic construct
CASSQDALSTGANVLTF

SEQ ID NO: 29699 - protein, 15 aa, synthetic construct
CASSFGSTAQETQYF

SEQ ID NO: 29700 - protein, 14 aa, synthetic construct
CASSPQGVRGEQFF

SEQ ID NO: 29701 - protein, 14 aa, synthetic construct
CASSWTTSTGELFF

SEQ ID NO: 29702 - protein, 14 aa, synthetic construct
CASKIMGLTDTQYF

SEQ ID NO: 29703 - protein, 16 aa, synthetic construct
CSARDRAGGAYNEQFF

SEQ ID NO: 29704 - protein, 14 aa, synthetic construct
CASSWTGPSYEQYF

SEQ ID NO: 29705 - protein, 13 aa, synthetic construct
CASSQEGNYGYTF

SEQ ID NO: 29706 - protein, 12 aa, synthetic construct
CASSLVAGELFF

SEQ ID NO: 29707 - protein, 12 aa, synthetic construct
CASSLGTGELFF

SEQ ID NO: 29708 - protein, 13 aa, synthetic construct
CASSLGTSYEQYF

SEQ ID NO: 29709 - protein, 13 aa, synthetic construct
CASRQGNTGELFF

SEQ ID NO: 29710 - protein, 14 aa, synthetic construct
CASSSGTGVTEAFF

SEQ ID NO: 29711 - protein, 13 aa, synthetic construct
CASSLTGGGGYTF

SEQ ID NO: 29712 - protein, 14 aa, synthetic construct
CSARLAGGPETQYF

SEQ ID NO: 29713 - protein, 12 aa, synthetic construct
CASSSQGGEQYF

SEQ ID NO: 29714 - protein, 13 aa, synthetic construct
CASSAASYNEQFF

SEQ ID NO: 29715 - protein, 11 aa, synthetic construct
CASSPSNEQFF

SEQ ID NO: 29716 - protein, 10 aa, synthetic construct
CASSGGEQYF

SEQ ID NO: 29717 - protein, 13 aa, synthetic construct
CASSQGTVYGYTF

SEQ ID NO: 29718 - protein, 13 aa, synthetic construct
CASSLRGADGYTF

SEQ ID NO: 29719 - protein, 13 aa, synthetic construct
CASSLTGDTEAFF

SEQ ID NO: 29720 - protein, 12 aa, synthetic construct
CASSAVRGPQHF

SEQ ID NO: 29721 - protein, 12 aa, synthetic construct
CASSPRGTEAFF

SEQ ID NO: 29722 - protein, 15 aa, synthetic construct
CASSPGLANTDTQYF

SEQ ID NO: 29723 - protein, 15 aa, synthetic construct
CASSPLGSSTDTQYF

SEQ ID NO: 29724 - protein, 14 aa, synthetic construct
CASSPGTGSYEQYF

SEQ ID NO: 29725 - protein, 14 aa, synthetic construct
CSARQGAANYGYTF

SEQ ID NO: 29726 - protein, 13 aa, synthetic construct
CASSLAGYNEQFF

SEQ ID NO: 29727 - protein, 14 aa, synthetic construct
CASSVGGSNQPQHF

SEQ ID NO: 29728 - protein, 11 aa, synthetic construct
CASSPYNEQFF

SEQ ID NO: 29729 - protein, 14 aa, synthetic construct
CASSLAGGNQPQHF

SEQ ID NO: 29730 - protein, 14 aa, synthetic construct
CASSAGQGGYEQYF

SEQ ID NO: 29731 - protein, 11 aa, synthetic construct
CASSSSYEQYF

SEQ ID NO: 29732 - protein, 13 aa, synthetic construct
CASSLGGYNEQFF

SEQ ID NO: 29733 - protein, 17 aa, synthetic construct
CASSLPGRLLGEREQYF

SEQ ID NO: 29734 - protein, 15 aa, synthetic construct
CASSYSSGGADTQYF

SEQ ID NO: 29735 - protein, 13 aa, synthetic construct
CASGLEVNTEAFF

SEQ ID NO: 29736 - protein, 18 aa, synthetic construct
CASSPDIGDSGGASEQFF

SEQ ID NO: 29737 - protein, 14 aa, synthetic construct
CASSEDGMNTEAFF

SEQ ID NO: 29738 - protein, 12 aa, synthetic construct
CASSPTGYEQYF

SEQ ID NO: 29739 - protein, 15 aa, synthetic construct
CASSESLGNTGELFF

SEQ ID NO: 29740 - protein, 15 aa, synthetic construct
CSARPGTGRVDRYTF

SEQ ID NO: 29741 - protein, 18 aa, synthetic construct
CASSSILASGTGATEAFF

SEQ ID NO: 29742 - protein, 15 aa, synthetic construct
CASSETSGGTDTQYF

SEQ ID NO: 29743 - protein, 14 aa, synthetic construct
CASSWGQGSYEQYF

SEQ ID NO: 29744 - protein, 13 aa, synthetic construct
CASSLDRNTEAFF

SEQ ID NO: 29745 - protein, 13 aa, synthetic construct
CASSFSGSYGYTF

SEQ ID NO: 29746 - protein, 12 aa, synthetic construct
CASSDRAQPQHF

SEQ ID NO: 29747 - protein, 14 aa, synthetic construct
CASSTIASLYEQYF

SEQ ID NO: 29748 - protein, 15 aa, synthetic construct
CASSLASGGQETQYF

SEQ ID NO: 29749 - protein, 13 aa, synthetic construct
CASSVAGGDEQFF

SEQ ID NO: 29750 - protein, 15 aa, synthetic construct
CASSLGTSGGNEQFF

SEQ ID NO: 29751 - protein, 13 aa, synthetic construct
CASSLYRGTEAFF

SEQ ID NO: 29752 - protein, 12 aa, synthetic construct
CASGGGLYEQYF

SEQ ID NO: 29753 - protein, 13 aa, synthetic construct
CASSQGQTYEQYF

SEQ ID NO: 29754 - protein, 12 aa, synthetic construct
CASSIGGTEAFF

SEQ ID NO: 29755 - protein, 11 aa, synthetic construct
CASSLGGEQYF

SEQ ID NO: 29756 - protein, 15 aa, synthetic construct
CASSRTGSSYNEQFF

SEQ ID NO: 29757 - protein, 15 aa, synthetic construct
CASSPTSGGYNEQFF

SEQ ID NO: 29758 - protein, 15 aa, synthetic construct
CASSGTGGGDSPLHF

SEQ ID NO: 29759 - protein, 14 aa, synthetic construct
CASSPGTGTYEQYF

SEQ ID NO: 29760 - protein, 12 aa, synthetic construct
CASSTEEETQYF

SEQ ID NO: 29761 - protein, 12 aa, synthetic construct
CASSQGSYGYTF

SEQ ID NO: 29762 - protein, 11 aa, synthetic construct
CASSQSYEQYF

SEQ ID NO: 29763 - protein, 11 aa, synthetic construct
CASSPGYEQYF

SEQ ID NO: 29764 - protein, 14 aa, synthetic construct
CSVGQGGTNEKLFF

SEQ ID NO: 29765 - protein, 10 aa, synthetic construct
CASSLETQYF

SEQ ID NO: 29766 - protein, 14 aa, synthetic construct
CASSLVGVNTEAFF

SEQ ID NO: 29767 - protein, 12 aa, synthetic construct
CASSLLGYEQYF

SEQ ID NO: 29768 - protein, 12 aa, synthetic construct
CASSIGWSGYTF

SEQ ID NO: 29769 - protein, 17 aa, synthetic construct
CASSLQASGSSYNEQFF

SEQ ID NO: 29770 - protein, 14 aa, synthetic construct
CASHARQGIYGYTF

SEQ ID NO: 29771 - protein, 13 aa, synthetic construct
CASSLGRVDEQYF

SEQ ID NO: 29772 - protein, 11 aa, synthetic construct
CASSPDIEQYF

SEQ ID NO: 29773 - protein, 12 aa, synthetic construct
CASSLLGAEAFF

SEQ ID NO: 29774 - protein, 12 aa, synthetic construct
CASSLAYNEQFF

SEQ ID NO: 29775 - protein, 14 aa, synthetic construct
CASSFGGGTDTQYF

SEQ ID NO: 29776 - protein, 14 aa, synthetic construct
CASSSTGASETQYF

SEQ ID NO: 29777 - protein, 13 aa, synthetic construct
CASGEGNTGELFF

SEQ ID NO: 29778 - protein, 13 aa, synthetic construct
CASSRGGYNEQFF

SEQ ID NO: 29779 - protein, 11 aa, synthetic construct
CASSLGYEQYF

SEQ ID NO: 29780 - protein, 12 aa, synthetic construct
CASSPGAGEAFF

SEQ ID NO: 29781 - protein, 12 aa, synthetic construct
CASSLGSGELFF

SEQ ID NO: 29782 - protein, 15 aa, synthetic construct
CASSLQRGRTDTQYF

SEQ ID NO: 29783 - protein, 12 aa, synthetic construct
CASSVEGETQYF

SEQ ID NO: 29784 - protein, 14 aa, synthetic construct
CASSLGGGNTEAFF

SEQ ID NO: 29785 - protein, 13 aa, synthetic construct
CASSLQGNQPQHF

SEQ ID NO: 29786 - protein, 13 aa, synthetic construct
CASGGTNTGELFF

SEQ ID NO: 29787 - protein, 12 aa, synthetic construct
CASSLVSGELFF

SEQ ID NO: 29788 - protein, 15 aa, synthetic construct
CASSLGQSSYNEQFF

SEQ ID NO: 29789 - protein, 13 aa, synthetic construct
CASSPPSSYEQYF

SEQ ID NO: 29790 - protein, 14 aa, synthetic construct
CASSEGASNQPQHF

SEQ ID NO: 29791 - protein, 12 aa, synthetic construct
CASSLGGAEAFF

SEQ ID NO: 29792 - protein, 13 aa, synthetic construct
CASSLGGNQPQHF

SEQ ID NO: 29793 - protein, 14 aa, synthetic construct
CASSPGQGGTEAFF

SEQ ID NO: 29794 - protein, 14 aa, synthetic construct
CASSLTGVNTEAFF

SEQ ID NO: 29795 - protein, 13 aa, synthetic construct
CASSPSGYNEQFF

SEQ ID NO: 29796 - protein, 13 aa, synthetic construct
CASSLSAAYEQYF

SEQ ID NO: 29797 - protein, 16 aa, synthetic construct
CATSDLGAGEGNEQFF

SEQ ID NO: 29798 - protein, 14 aa, synthetic construct
CASSLSSATGELFF

SEQ ID NO: 29799 - protein, 15 aa, synthetic construct
CASSLDWTANNEQFF

SEQ ID NO: 29800 - protein, 12 aa, synthetic construct
CASSLGNQPQHF

SEQ ID NO: 29801 - protein, 13 aa, synthetic construct
CASSDSAMTEAFF

SEQ ID NO: 29802 - protein, 15 aa, synthetic construct
CASSLVPRVGLGYTF

SEQ ID NO: 29803 - protein, 12 aa, synthetic construct
CSARDRDTEAFF

SEQ ID NO: 29804 - protein, 15 aa, synthetic construct
CSASGPGLYYNEQFF

SEQ ID NO: 29805 - protein, 13 aa, synthetic construct
CASSLGSYNEQFF

SEQ ID NO: 29806 - protein, 12 aa, synthetic construct
CASSLVGETQYF

SEQ ID NO: 29807 - protein, 16 aa, synthetic construct
CASSSRRQAKQETQYF

SEQ ID NO: 29808 - protein, 15 aa, synthetic construct
CASSELAGSYNEQFF

SEQ ID NO: 29809 - protein, 16 aa, synthetic construct
CASSQDLAGGPDTQYF

SEQ ID NO: 29810 - protein, 13 aa, synthetic construct
CASSRQNTGELFF

SEQ ID NO: 29811 - protein, 15 aa, synthetic construct
CASSDSAGGTDTQYF

SEQ ID NO: 29812 - protein, 15 aa, synthetic construct
CASSQARTGGTEAFF

SEQ ID NO: 29813 - protein, 14 aa, synthetic construct
CASSDGTGADTQYF

SEQ ID NO: 29814 - protein, 13 aa, synthetic construct
CASSFGGNTEAFF

SEQ ID NO: 29815 - protein, 15 aa, synthetic construct
CASSDSTGGYNEQFF

SEQ ID NO: 29816 - protein, 11 aa, synthetic construct
CASTLSYEQYF

SEQ ID NO: 29817 - protein, 13 aa, synthetic construct
CASSTGAAQPQHF

SEQ ID NO: 29818 - protein, 11 aa, synthetic construct
CASSGGYEQYF

SEQ ID NO: 29819 - protein, 15 aa, synthetic construct
CASSDSTSGGNEQFF

SEQ ID NO: 29820 - protein, 15 aa, synthetic construct
CASSLAESSYNEQFF

SEQ ID NO: 29821 - protein, 15 aa, synthetic construct
CASSLTSGSTDTQYF

SEQ ID NO: 29822 - protein, 13 aa, synthetic construct
CASSEGNTGELFF

SEQ ID NO: 29823 - protein, 13 aa, synthetic construct
CASSYRATDTQYF

SEQ ID NO: 29824 - protein, 14 aa, synthetic construct
CASSLGTGTGELFF

SEQ ID NO: 29825 - protein, 15 aa, synthetic construct
CASSDGTSGSNEQFF

SEQ ID NO: 29826 - protein, 14 aa, synthetic construct
CASSLEGGTDTQYF

SEQ ID NO: 29827 - protein, 15 aa, synthetic construct
CASSLGGSSYNEQFF

SEQ ID NO: 29828 - protein, 13 aa, synthetic construct
CASSPGTSYEQYF

SEQ ID NO: 29829 - protein, 15 aa, synthetic construct
CASSELAGGTDTQYF

SEQ ID NO: 29830 - protein, 11 aa, synthetic construct
CASSPGTEAFF

SEQ ID NO: 29831 - protein, 12 aa, synthetic construct
CASSLGGSPLHF

SEQ ID NO: 29832 - protein, 12 aa, synthetic construct
CASSPRGEKLFF

SEQ ID NO: 29833 - protein, 13 aa, synthetic construct
CASSPDSYNEQFF

SEQ ID NO: 29834 - protein, 12 aa, synthetic construct
CASSPGAYEQYF

SEQ ID NO: 29835 - protein, 13 aa, synthetic construct
CASSLGQSYEQYF

SEQ ID NO: 29836 - protein, 15 aa, synthetic construct
CASSQTSGGYNEQFF

SEQ ID NO: 29837 - protein, 12 aa, synthetic construct
CASSPGTYGYTF

SEQ ID NO: 29838 - protein, 14 aa, synthetic construct
CASSPGQGPYEQYF

SEQ ID NO: 29839 - protein, 17 aa, synthetic construct
CASTNEGGAGMGEKLFF

SEQ ID NO: 29840 - protein, 14 aa, synthetic construct
CASSDSIGGNEQFF

SEQ ID NO: 29841 - protein, 13 aa, synthetic construct
CSARVDSSYEQYF

SEQ ID NO: 29842 - protein, 14 aa, synthetic construct
CASSLGQGPYEQYF

SEQ ID NO: 29843 - protein, 13 aa, synthetic construct
CASSLDRSYEQYF

SEQ ID NO: 29844 - protein, 14 aa, synthetic construct
CASRSGQMNTEAFF

SEQ ID NO: 29845 - protein, 11 aa, synthetic construct
CASSLDYEQFF

SEQ ID NO: 29846 - protein, 10 aa, synthetic construct
CASGDNEQFF

SEQ ID NO: 29847 - protein, 14 aa, synthetic construct
CASSLDGSNQPQHF

SEQ ID NO: 29848 - protein, 13 aa, synthetic construct
CASSDSNTGELFF

SEQ ID NO: 29849 - protein, 11 aa, synthetic construct
CASSLEETQYF

SEQ ID NO: 29850 - protein, 12 aa, synthetic construct
CASSGAGYGYTF

SEQ ID NO: 29851 - protein, 14 aa, synthetic construct
CASSVGGSYNEQFF

SEQ ID NO: 29852 - protein, 15 aa, synthetic construct
CATSRDRSSGNTIYF

SEQ ID NO: 29853 - protein, 14 aa, synthetic construct
CASSLGGGSYEQYF

SEQ ID NO: 29854 - protein, 13 aa, synthetic construct
CASSDRATGELFF

SEQ ID NO: 29855 - protein, 13 aa, synthetic construct
CASSDRDTGELFF

SEQ ID NO: 29856 - protein, 13 aa, synthetic construct
CASSQTGGTEAFF

SEQ ID NO: 29857 - protein, 15 aa, synthetic construct
CASSFGTGHTGELFF

SEQ ID NO: 29858 - protein, 16 aa, synthetic construct
CASSPLTGTGAYGYTF

SEQ ID NO: 29859 - protein, 13 aa, synthetic construct
CASSPDRTDTQYF

SEQ ID NO: 29860 - protein, 12 aa, synthetic construct
CASSIGNYGYTF

SEQ ID NO: 29861 - protein, 14 aa, synthetic construct
CASSLAGVSYEQYF

SEQ ID NO: 29862 - protein, 16 aa, synthetic construct
CASSLSLAGLQETQYF

SEQ ID NO: 29863 - protein, 14 aa, synthetic construct
CASSLSTTNEKLFF

SEQ ID NO: 29864 - protein, 17 aa, synthetic construct
CASSLSALAGSYNEQFF

SEQ ID NO: 29865 - protein, 15 aa, synthetic construct
CASSLGVSYNSPLHF

SEQ ID NO: 29866 - protein, 16 aa, synthetic construct
CASSLAPGATNEKLFF

SEQ ID NO: 29867 - protein, 10 aa, synthetic construct
CASAGETQYF

SEQ ID NO: 29868 - protein, 16 aa, synthetic construct
CASSATSRGLNQPQHF

SEQ ID NO: 29869 - protein, 13 aa, synthetic construct
CASSYDSNYGYTF

SEQ ID NO: 29870 - protein, 12 aa, synthetic construct
CASSLGGGELFF

SEQ ID NO: 29871 - protein, 14 aa, synthetic construct
CASSLVGGRYGYTF

SEQ ID NO: 29872 - protein, 15 aa, synthetic construct
CASSVTSGSYNEQFF

SEQ ID NO: 29873 - protein, 14 aa, synthetic construct
CASSLAANTGELFF

SEQ ID NO: 29874 - protein, 12 aa, synthetic construct
CASSFSAGELFF

SEQ ID NO: 29875 - protein, 14 aa, synthetic construct
CASSLPGGANVLTF

SEQ ID NO: 29876 - protein, 13 aa, synthetic construct
CASSLGRNTEAFF

SEQ ID NO: 29877 - protein, 17 aa, synthetic construct
CATSPGLAGAHQETQYF

SEQ ID NO: 29878 - protein, 13 aa, synthetic construct
CASSFGGYNEQFF

SEQ ID NO: 29879 - protein, 13 aa, synthetic construct
CASSSGQGYEQYF

SEQ ID NO: 29880 - protein, 12 aa, synthetic construct
CASSLSGNEQYF

SEQ ID NO: 29881 - protein, 14 aa, synthetic construct
CASSVATGTYEQYF

SEQ ID NO: 29882 - protein, 17 aa, synthetic construct
CATSRDKGGATTGELFF

SEQ ID NO: 29883 - protein, 12 aa, synthetic construct
CASSLGGNEQFF

SEQ ID NO: 29884 - protein, 14 aa, synthetic construct
CASSLGSSNQPQHF

SEQ ID NO: 29885 - protein, 13 aa, synthetic construct
CASSDRSNTEAFF

SEQ ID NO: 29886 - protein, 13 aa, synthetic construct
CSARDRVGNTIYF

SEQ ID NO: 29887 - protein, 10 aa, synthetic construct
CASSFGEQFF

SEQ ID NO: 29888 - protein, 10 aa, synthetic construct
CASSYNEQFF

SEQ ID NO: 29889 - protein, 14 aa, synthetic construct
CASSTTGSTDTQYF

SEQ ID NO: 29890 - protein, 12 aa, synthetic construct
CASSLGDTEAFF

SEQ ID NO: 29891 - protein, 12 aa, synthetic construct
CASSPGGYEQYF

SEQ ID NO: 29892 - protein, 12 aa, synthetic construct
CASSLVGTEAFF

SEQ ID NO: 29893 - protein, 14 aa, synthetic construct
CASSPSGFTDTQYF

SEQ ID NO: 29894 - protein, 12 aa, synthetic construct
CSVGGSFYGYTF

SEQ ID NO: 29895 - protein, 14 aa, synthetic construct
CASSLNRLNTEAFF

SEQ ID NO: 29896 - protein, 13 aa, synthetic construct
CASSFGDNQPQHF

SEQ ID NO: 29897 - protein, 13 aa, synthetic construct
CASSIRSSYEQYF

SEQ ID NO: 29898 - protein, 12 aa, synthetic construct
CASSLGPDTQYF

SEQ ID NO: 29899 - protein, 12 aa, synthetic construct
CASSSGGTEAFF

SEQ ID NO: 29900 - protein, 12 aa, synthetic construct
CASSLGGYEQYF

SEQ ID NO: 29901 - protein, 13 aa, synthetic construct
CASSLTATDTQYF

SEQ ID NO: 29902 - protein, 13 aa, synthetic construct
CASSDGNTGELFF

SEQ ID NO: 29903 - protein, 11 aa, synthetic construct
CASSASYEQYF

SEQ ID NO: 29904 - protein, 14 aa, synthetic construct
CASSYSGRNTEAFF

SEQ ID NO: 29905 - protein, 12 aa, synthetic construct
CASSLGGSEAFF

SEQ ID NO: 29906 - protein, 15 aa, synthetic construct
CASSLAGGPGNEQFF

SEQ ID NO: 29907 - protein, 14 aa, synthetic construct
CASSVAGGTDTQYF

SEQ ID NO: 29908 - protein, 12 aa, synthetic construct
CASSLGNYEQYF

SEQ ID NO: 29909 - protein, 13 aa, synthetic construct
CASSERSTDTQYF

SEQ ID NO: 29910 - protein, 14 aa, synthetic construct
CASSPRGDYYGYTF

SEQ ID NO: 29911 - protein, 13 aa, synthetic construct
CASSLGGNTEAFF

SEQ ID NO: 29912 - protein, 14 aa, synthetic construct
CASSLRQGNQPQHF

SEQ ID NO: 29913 - protein, 11 aa, synthetic construct
CASSDGDEQFF

SEQ ID NO: 29914 - protein, 14 aa, synthetic construct
CASSLEAGNTEAFF

SEQ ID NO: 29915 - protein, 14 aa, synthetic construct
CASSLAGDTGELFF

SEQ ID NO: 29916 - protein, 12 aa, synthetic construct
CASSLGPLEQYF

SEQ ID NO: 29917 - protein, 14 aa, synthetic construct
CASSEGQGADTQYF

SEQ ID NO: 29918 - protein, 14 aa, synthetic construct
CASSLEQGSYEQYF

SEQ ID NO: 29919 - protein, 14 aa, synthetic construct
CASSTQGANYGYTF

SEQ ID NO: 29920 - protein, 12 aa, synthetic construct
CASSSQGYEQYF

SEQ ID NO: 29921 - protein, 12 aa, synthetic construct
CASSLGTDTQYF

SEQ ID NO: 29922 - protein, 12 aa, synthetic construct
CASSLGGTEAFF

SEQ ID NO: 29923 - protein, 13 aa, synthetic construct
CASSPLNTGELFF

SEQ ID NO: 29924 - protein, 10 aa, synthetic construct
CASGGNEQFF

SEQ ID NO: 29925 - protein, 14 aa, synthetic construct
CASSPGLAGDEQFF

SEQ ID NO: 29926 - protein, 12 aa, synthetic construct
CASSMGNTEAFF

SEQ ID NO: 29927 - protein, 14 aa, synthetic construct
CASSYSGRAHEQYF

SEQ ID NO: 29928 - protein, 13 aa, synthetic construct
CASSLARTDTQYF

SEQ ID NO: 29929 - protein, 11 aa, synthetic construct
CASSQGYEQYF

SEQ ID NO: 29930 - protein, 12 aa, synthetic construct
CASSLVGGEQFF

SEQ ID NO: 29931 - protein, 13 aa, synthetic construct
CASSLGENTEAFF

SEQ ID NO: 29932 - protein, 13 aa, synthetic construct
CASSPGGLNEQYF

SEQ ID NO: 29933 - protein, 13 aa, synthetic construct
CASSLGTGYGYTF

SEQ ID NO: 29934 - protein, 13 aa, synthetic construct
CASSVGGYTEAFF

SEQ ID NO: 29935 - protein, 13 aa, synthetic construct
CASSLSGYNEQFF

SEQ ID NO: 29936 - protein, 14 aa, synthetic construct
CASSWTSGSYEQYF

SEQ ID NO: 29937 - protein, 13 aa, synthetic construct
CASSLGDSYEQYF

SEQ ID NO: 29938 - protein, 13 aa, synthetic construct
CASSLLGDTEAFF

SEQ ID NO: 29939 - protein, 13 aa, synthetic construct
CASSFGTFETQYF

SEQ ID NO: 29940 - protein, 11 aa, synthetic construct
CASSLDIEAFF

SEQ ID NO: 29941 - protein, 14 aa, synthetic construct
CASSPTGYYNEQFF

SEQ ID NO: 29942 - protein, 11 aa, synthetic construct
CASSYSYEQYF

SEQ ID NO: 29943 - protein, 16 aa, synthetic construct
CASSLEGLAAQETQYF

SEQ ID NO: 29944 - protein, 14 aa, synthetic construct
CASSLQGSNSPLHF

SEQ ID NO: 29945 - protein, 13 aa, synthetic construct
CASSLETGYEQYF

SEQ ID NO: 29946 - protein, 15 aa, synthetic construct
CASSPTGGSYNEQFF

SEQ ID NO: 29947 - protein, 14 aa, synthetic construct
CASSLGGSTDTQYF

SEQ ID NO: 29948 - protein, 14 aa, synthetic construct
CASSLGGGADTQYF

SEQ ID NO: 29949 - protein, 12 aa, synthetic construct
CASSYQTGELFF

SEQ ID NO: 29950 - protein, 13 aa, synthetic construct
CASSLSSYNEQFF

SEQ ID NO: 29951 - protein, 13 aa, synthetic construct
CASSLGVNTEAFF

SEQ ID NO: 29952 - protein, 12 aa, synthetic construct
CASSLSGYEQYF

SEQ ID NO: 29953 - protein, 13 aa, synthetic construct
CASSFGSQETQYF

SEQ ID NO: 29954 - protein, 12 aa, synthetic construct
CASRTGNYGYTF

SEQ ID NO: 29955 - protein, 13 aa, synthetic construct
CASSLTENTEAFF

SEQ ID NO: 29956 - protein, 13 aa, synthetic construct
CASSLGNTGELFF

SEQ ID NO: 29957 - protein, 12 aa, synthetic construct
CASSRGYNEQFF

SEQ ID NO: 29958 - protein, 13 aa, synthetic construct
CASSHGQGYEQYF

SEQ ID NO: 29959 - protein, 11 aa, synthetic construct
CASSSTGELFF

SEQ ID NO: 29960 - protein, 14 aa, synthetic construct
CASSLGTGSYEQYF

SEQ ID NO: 29961 - protein, 12 aa, synthetic construct
CASSLGETEAFF

SEQ ID NO: 29962 - protein, 14 aa, synthetic construct
CASSPRTGNYEQYF

SEQ ID NO: 29963 - protein, 13 aa, synthetic construct
CASSLPGNQPQHF

SEQ ID NO: 29964 - protein, 13 aa, synthetic construct
CASSYGGSYEQYF

SEQ ID NO: 29965 - protein, 16 aa, synthetic construct
CASSQDMGQGTDTQYF

SEQ ID NO: 29966 - protein, 14 aa, synthetic construct
CASSLTGGSYEQYF

SEQ ID NO: 29967 - protein, 12 aa, synthetic construct
CASSPGNTEAFF

SEQ ID NO: 29968 - protein, 13 aa, synthetic construct
CASSGANTGELFF

SEQ ID NO: 29969 - protein, 12 aa, synthetic construct
CASRQGGDGYTF

SEQ ID NO: 29970 - protein, 11 aa, synthetic construct
CSALSGNTIYF

SEQ ID NO: 29971 - protein, 14 aa, synthetic construct
CASSLAGGYTEAFF

SEQ ID NO: 29972 - protein, 15 aa, synthetic construct
CASSLSGSSYNEQFF

SEQ ID NO: 29973 - protein, 11 aa, synthetic construct
CASSLTSEQFF

SEQ ID NO: 29974 - protein, 13 aa, synthetic construct
CASSQSPGGTQYF

SEQ ID NO: 29975 - protein, 11 aa, synthetic construct
CASSLSGELFF

SEQ ID NO: 29976 - protein, 12 aa, synthetic construct
CASSLGSTEAFF

SEQ ID NO: 29977 - protein, 13 aa, synthetic construct
CSARWGVGNTIYF

SEQ ID NO: 29978 - protein, 11 aa, synthetic construct
CASSWGYEQYF

SEQ ID NO: 29979 - protein, 14 aa, synthetic construct
CASSPDGSSYEQYF

SEQ ID NO: 29980 - protein, 12 aa, synthetic construct
CSARRGGDTQYF

SEQ ID NO: 29981 - protein, 14 aa, synthetic construct
CASSYQGGNYGYTF

SEQ ID NO: 29982 - protein, 14 aa, synthetic construct
CASTLAGGTDTQYF

SEQ ID NO: 29983 - protein, 14 aa, synthetic construct
CASSSQGSTDTQYF

SEQ ID NO: 29984 - protein, 13 aa, synthetic construct
CASSTGQAYEQYF

SEQ ID NO: 29985 - protein, 14 aa, synthetic construct
CATSTGDSNQPQHF

SEQ ID NO: 29986 - protein, 15 aa, synthetic construct
CASSFRTVSSYEQYF

SEQ ID NO: 29987 - protein, 14 aa, synthetic construct
CSVGTGGTNEKLFF

SEQ ID NO: 29988 - protein, 9 aa, synthetic construct
VSWGYIKCK

SEQ ID NO: 29989 - protein, 10 aa, synthetic construct
YSNYNLILKK

SEQ ID NO: 29990 - protein, 11 aa, synthetic construct
KVLYKSKTEKY

SEQ ID NO: 29991 - protein, 9 aa, synthetic construct
RQIATVMSR

SEQ ID NO: 29992 - protein, 9 aa, synthetic construct
ASQAQILDK

SEQ ID NO: 29993 - protein, 10 aa, synthetic construct
GDVHHFDSSK

SEQ ID NO: 29994 - protein, 9 aa, synthetic construct
GMAGSCLRR

SEQ ID NO: 29995 - protein, 10 aa, synthetic construct
KASQAQILDK

SEQ ID NO: 29996 - protein, 10 aa, synthetic construct
KNYPTPRTTR

SEQ ID NO: 29997 - protein, 10 aa, synthetic construct
KLFSTLTRHK

SEQ ID NO: 29998 - protein, 11 aa, synthetic construct
KLFSTLTRHKR

SEQ ID NO: 29999 - protein, 9 aa, synthetic construct
GNLDGSMQK

SEQ ID NO: 30000 - protein, 11 aa, synthetic construct
PKVLYKSKTEK

SEQ ID NO: 30001 - protein, 11 aa, synthetic construct
FKLFSTLTRHK

SEQ ID NO: 30002 - protein, 11 aa, synthetic construct
KTEKYSFPHTY

SEQ ID NO: 30003 - protein, 11 aa, synthetic construct
RIRDGDFGVLK

SEQ ID NO: 30004 - protein, 11 aa, synthetic construct
SDYSFYNLILK

SEQ ID NO: 30005 - protein, 11 aa, synthetic construct
SIYAPLIAVLR

SEQ ID NO: 30006 - protein, 9 aa, synthetic construct
ISFDFRTTK

SEQ ID NO: 30007 - protein, 10 aa, synthetic construct
AASQAQILDK

SEQ ID NO: 30008 - protein, 11 aa, synthetic construct
SVSEMASNKCK

SEQ ID NO: 30009 - protein, 9 aa, synthetic construct
GVRSGSRHR

SEQ ID NO: 30010 - protein, 11 aa, synthetic construct
TVMSRAQGLPK

SEQ ID NO: 30011 - protein, 11 aa, synthetic construct
RLPRITPPLPK

SEQ ID NO: 30012 - protein, 10 aa, synthetic construct
KVLYKSKTEK

SEQ ID NO: 30013 - protein, 9 aa, synthetic construct
RANAQTAVR

SEQ ID NO: 30014 - protein, 10 aa, synthetic construct
RYLYLAMLER

SEQ ID NO: 30015 - protein, 9 aa, synthetic construct
SNYNLILKK

SEQ ID NO: 30016 - protein, 10 aa, synthetic construct
SISFDFRTTK

SEQ ID NO: 30017 - protein, 9 aa, synthetic construct
GTKAGVSYR

SEQ ID NO: 30018 - protein, 10 aa, synthetic construct
VLYKSKTEKY

SEQ ID NO: 30019 - protein, 11 aa, synthetic construct
KAFKLFSTLTR

SEQ ID NO: 30020 - protein, 10 aa, synthetic construct
GVLKREDVFK

SEQ ID NO: 30021 - protein, 11 aa, synthetic construct
GLKTADWKGEK

SEQ ID NO: 30022 - protein, 10 aa, synthetic construct
YSFYNLILKK

SEQ ID NO: 30023 - protein, 9 aa, synthetic construct
IIADFCILR

SEQ ID NO: 30024 - protein, 11 aa, synthetic construct
AFKLFSTLTRH

SEQ ID NO: 30025 - protein, 9 aa, synthetic construct
YSNYNLILK

SEQ ID NO: 30026 - protein, 10 aa, synthetic construct
SVSWGYIKCK

SEQ ID NO: 30027 - protein, 11 aa, synthetic construct
SDYSNYNLILK

SEQ ID NO: 30028 - protein, 9 aa, synthetic construct
KTADWKGEK

SEQ ID NO: 30029 - protein, 10 aa, synthetic construct
VLNSTSFLDY

SEQ ID NO: 30030 - protein, 9 aa, synthetic construct
RTESHQHQH

SEQ ID NO: 30031 - protein, 10 aa, synthetic construct
RRQIATVMSR

SEQ ID NO: 30032 - protein, 10 aa, synthetic construct
RGTKAGVSYR

SEQ ID NO: 30033 - protein, 11 aa, synthetic construct
GSISFDFRTTK

SEQ ID NO: 30034 - protein, 8 aa, synthetic construct
RITPPLPK

SEQ ID NO: 30035 - protein, 9 aa, synthetic construct
KLFSTLTRH

SEQ ID NO: 30036 - protein, 8 aa, synthetic construct
KLFSTLTR

SEQ ID NO: 30037 - protein, 11 aa, synthetic construct
RRGTKAGVSYR

SEQ ID NO: 30038 - protein, 9 aa, synthetic construct
VLYKSKTEK

SEQ ID NO: 30039 - protein, 11 aa, synthetic construct
EVGNLDGSMQK

SEQ ID NO: 30040 - protein, 9 aa, synthetic construct
SFYNLILKK

SEQ ID NO: 30041 - protein, 9 aa, synthetic construct
YSFYNLILK

SEQ ID NO: 30042 - protein, 9 aa, synthetic construct
DVHHFDSSK

SEQ ID NO: 30043 - protein, 11 aa, synthetic construct
IIADFCILRIR

SEQ ID NO: 30044 - protein, 11 aa, synthetic construct
EGAFRNSNYLR

SEQ ID NO: 30045 - protein, 9 aa, synthetic construct
YAPLIAVLR

SEQ ID NO: 30046 - protein, 9 aa, synthetic construct
SWGYIKCKR

SEQ ID NO: 30047 - protein, 11 aa, synthetic construct
RENYDIIKTYR

SEQ ID NO: 30048 - protein, 9 aa, synthetic construct
EMASNKCKR

SEQ ID NO: 30049 - protein, 10 aa, synthetic construct
GAFRNSNYLR

SEQ ID NO: 30050 - protein, 9 aa, synthetic construct
TADWKGEKR

SEQ ID NO: 30051 - protein, 11 aa, synthetic construct
EKNYPTPRTTR

SEQ ID NO: 30052 - protein, 10 aa, synthetic construct
TVCDTIAQLR

SEQ ID NO: 30053 - protein, 10 aa, synthetic construct
AFKLFSTLTR

SEQ ID NO: 30054 - protein, 8 aa, synthetic construct
QIATVMSR

SEQ ID NO: 30055 - protein, 10 aa, synthetic construct
PLWGVRSGSR

SEQ ID NO: 30056 - protein, 9 aa, synthetic construct
NYPTPRTTR

SEQ ID NO: 30057 - protein, 9 aa, synthetic construct
NLDDDSHER

SEQ ID NO: 30058 - protein, 10 aa, synthetic construct
LFSTLTRHKR

SEQ ID NO: 30059 - protein, 8 aa, synthetic construct
TKAGVSYR

SEQ ID NO: 30060 - protein, 10 aa, synthetic construct
YIKCKRMLNR

SEQ ID NO: 30061 - protein, 8 aa, synthetic construct
MANVSLHR

SEQ ID NO: 30062 - protein, 10 aa, synthetic construct
TPPLPKPASR

SEQ ID NO: 30063 - protein, 9 aa, synthetic construct
AFRNSNYLR

SEQ ID NO: 30064 - protein, 10 aa, synthetic construct
ENYDIIKTYR

SEQ ID NO: 30065 - protein, 10 aa, synthetic construct
DLGMAGSCLR

SEQ ID NO: 30066 - protein, 11 aa, synthetic construct
ITPPLPKPASR

SEQ ID NO: 30067 - protein, 10 aa, synthetic construct
VIIADFCILR

SEQ ID NO: 30068 - protein, 9 aa, synthetic construct
NYDIIKTYR

SEQ ID NO: 30069 - protein, 11 aa, synthetic construct
EVIIADFCILR

SEQ ID NO: 30070 - protein, 11 aa, synthetic construct
SVSWGYIKCKR

SEQ ID NO: 30071 - protein, 11 aa, synthetic construct
EKYSFPHTYIR

SEQ ID NO: 30072 - protein, 10 aa, synthetic construct
KTADWKGEKR

SEQ ID NO: 30073 - protein, 10 aa, synthetic construct
IYAPLIAVLR

SEQ ID NO: 30074 - protein, 9 aa, synthetic construct
LFSTLTRHK

SEQ ID NO: 30075 - protein, 10 aa, synthetic construct
VSWGYIKCKR

SEQ ID NO: 30076 - protein, 11 aa, synthetic construct
ERRQIATVMSR

SEQ ID NO: 30077 - protein, 9 aa, synthetic construct
DSSENGLVR

SEQ ID NO: 30078 - protein, 9 aa, synthetic construct
QPPPAPAPP

SEQ ID NO: 30079 - protein, 9 aa, synthetic construct
APPPLQTAP

SEQ ID NO: 30080 - protein, 9 aa, synthetic construct
KAFKLFSTL

SEQ ID NO: 30081 - protein, 10 aa, synthetic construct
APLIAVLRGL

SEQ ID NO: 30082 - protein, 9 aa, synthetic construct
APAPLTTPP

SEQ ID NO: 30083 - protein, 8 aa, synthetic construct
APAPLTTP

SEQ ID NO: 30084 - protein, 11 aa, synthetic construct
SPLGGPGPSAL

SEQ ID NO: 30085 - protein, 8 aa, synthetic construct
APPPVQSH

SEQ ID NO: 30086 - protein, 10 aa, synthetic construct
APPPLQTPSA

SEQ ID NO: 30087 - protein, 9 aa, synthetic construct
RLPRITPPL

SEQ ID NO: 30088 - protein, 10 aa, synthetic construct
RIRDGDFGVL

SEQ ID NO: 30089 - protein, 11 aa, synthetic construct
TAPAPLTTPPL

SEQ ID NO: 30090 - protein, 9 aa, synthetic construct
LPRITPPLP

SEQ ID NO: 30091 - protein, 8 aa, synthetic construct
LPRITPPL

SEQ ID NO: 30092 - protein, 9 aa, synthetic construct
SPLGGPGPS

SEQ ID NO: 30093 - protein, 9 aa, synthetic construct
TPSAPLTTP

SEQ ID NO: 30094 - protein, 8 aa, synthetic construct
CPGPKGSI

SEQ ID NO: 30095 - protein, 9 aa, synthetic construct
STAFSIHSL

SEQ ID NO: 30096 - protein, 11 aa, synthetic construct
APPPVQSHPPI

SEQ ID NO: 30097 - protein, 10 aa, synthetic construct
APIPQGLSCL

SEQ ID NO: 30098 - protein, 9 aa, synthetic construct
YPTPRTTRT

SEQ ID NO: 30099 - protein, 8 aa, synthetic construct
KPNGLILF

SEQ ID NO: 30100 - protein, 9 aa, synthetic construct
APPPVQSHP

SEQ ID NO: 30101 - protein, 10 aa, synthetic construct
SPLGGPGPSA

SEQ ID NO: 30102 - protein, 8 aa, synthetic construct
TPLELQSL

SEQ ID NO: 30103 - protein, 10 aa, synthetic construct
PPLQTPSAPL

SEQ ID NO: 30104 - protein, 9 aa, synthetic construct
GPLWVGGSL

SEQ ID NO: 30105 - protein, 11 aa, synthetic construct
TPSAPLTTPPL

SEQ ID NO: 30106 - protein, 10 aa, synthetic construct
APSGHPLSAM

SEQ ID NO: 30107 - protein, 11 aa, synthetic construct
APSGHPLSAMS

SEQ ID NO: 30108 - protein, 10 aa, synthetic construct
AGPLWVGGSL

SEQ ID NO: 30109 - protein, 8 aa, synthetic construct
PLWVGGSL

SEQ ID NO: 30110 - protein, 9 aa, synthetic construct
TTKPNGLIL

SEQ ID NO: 30111 - protein, 11 aa, synthetic construct
ALRLPRITPPL

SEQ ID NO: 30112 - protein, 10 aa, synthetic construct
RLPRITPPLP

SEQ ID NO: 30113 - protein, 8 aa, synthetic construct
IPQGLSCL

SEQ ID NO: 30114 - protein, 11 aa, synthetic construct
LDYPDPVLEPL

SEQ ID NO: 30115 - protein, 11 aa, synthetic construct
YPTPRTTRTGH

SEQ ID NO: 30116 - protein, 9 aa, synthetic construct
MSEPPHSNM

SEQ ID NO: 30117 - protein, 11 aa, synthetic construct
GAPSGHPLSAM

SEQ ID NO: 30118 - protein, 11 aa, synthetic construct
YPGCPGPKGSI

SEQ ID NO: 30119 - protein, 10 aa, synthetic construct
AAPIPQGLSC

SEQ ID NO: 30120 - protein, 10 aa, synthetic construct
APAPPPVQSH

SEQ ID NO: 30121 - protein, 11 aa, synthetic construct
APAPPPVQSHP

SEQ ID NO: 30122 - protein, 9 aa, synthetic construct
PPVQSHPPI

SEQ ID NO: 30123 - protein, 8 aa, synthetic construct
APAPPPVQ

SEQ ID NO: 30124 - protein, 9 aa, synthetic construct
APAPPPVQS

SEQ ID NO: 30125 - protein, 11 aa, synthetic construct
AAPIPQGLSCL

SEQ ID NO: 30126 - protein, 9 aa, synthetic construct
TPRTTRTGH

SEQ ID NO: 30127 - protein, 9 aa, synthetic construct
SAASQAQIL

SEQ ID NO: 30128 - protein, 11 aa, synthetic construct
QPPPAPAPPPV

SEQ ID NO: 30129 - protein, 9 aa, synthetic construct
MAAPIPQGL

SEQ ID NO: 30130 - protein, 10 aa, synthetic construct
GPLWVGGSLV

SEQ ID NO: 30131 - protein, 9 aa, synthetic construct
TPPLPKPAS

SEQ ID NO: 30132 - protein, 11 aa, synthetic construct
GPLWVGGSLVL

SEQ ID NO: 30133 - protein, 11 aa, synthetic construct
HAGPLWVGGSL

SEQ ID NO: 30134 - protein, 11 aa, synthetic construct
APAPLTTPPLE

SEQ ID NO: 30135 - protein, 10 aa, synthetic construct
APAPLTTPPL

SEQ ID NO: 30136 - protein, 10 aa, synthetic construct
SEPHGSSSAS

SEQ ID NO: 30137 - protein, 10 aa, synthetic construct
RTTKPNGLIL

SEQ ID NO: 30138 - protein, 9 aa, synthetic construct
PPAPAPPPV

SEQ ID NO: 30139 - protein, 9 aa, synthetic construct
TVMSRAQGL

SEQ ID NO: 30140 - protein, 10 aa, synthetic construct
CPGPKGSIGF

SEQ ID NO: 30141 - protein, 11 aa, synthetic construct
QPRFQSAASQA

SEQ ID NO: 30142 - protein, 8 aa, synthetic construct
APIPQGLS

SEQ ID NO: 30143 - protein, 9 aa, synthetic construct
APIPQGLSC

SEQ ID NO: 30144 - protein, 11 aa, synthetic construct
IPQGLSCLSRF

SEQ ID NO: 30145 - protein, 11 aa, synthetic construct
APIPQGLSCLS

SEQ ID NO: 30146 - protein, 10 aa, synthetic construct
APPPLQTAPA

SEQ ID NO: 30147 - protein, 8 aa, synthetic construct
HPLSAMSF

SEQ ID NO: 30148 - protein, 9 aa, synthetic construct
HPLSAMSFA

SEQ ID NO: 30149 - protein, 10 aa, synthetic construct
DGSMQKVLVW

SEQ ID NO: 30150 - protein, 9 aa, synthetic construct
GSMQKVLVW

SEQ ID NO: 30151 - protein, 10 aa, synthetic construct
TTKPNGLILF

SEQ ID NO: 30152 - protein, 9 aa, synthetic construct
KSKTEKYSF

SEQ ID NO: 30153 - protein, 10 aa, synthetic construct
LGDLIMALGW

SEQ ID NO: 30154 - protein, 9 aa, synthetic construct
MAGSCLRRF

SEQ ID NO: 30155 - protein, 11 aa, synthetic construct
KEDGVGDVHHF

SEQ ID NO: 30156 - protein, 9 aa, synthetic construct
ASKDTTPSI

SEQ ID NO: 30157 - protein, 9 aa, synthetic construct
QSAASQAQI

SEQ ID NO: 30158 - protein, 10 aa, synthetic construct
YAYGLKTADW

SEQ ID NO: 30159 - protein, 9 aa, synthetic construct
RTTKPNGLI

SEQ ID NO: 30160 - protein, 10 aa, synthetic construct
LSCLSRFLGW

SEQ ID NO: 30161 - protein, 11 aa, synthetic construct
LSCLSRFLGWW

SEQ ID NO: 30162 - protein, 9 aa, synthetic construct
NSNYLRLLF

SEQ ID NO: 30163 - protein, 9 aa, synthetic construct
KQTESDYSF

SEQ ID NO: 30164 - protein, 10 aa, synthetic construct
FSFVGMDSDW

SEQ ID NO: 30165 - protein, 9 aa, synthetic construct
TAFSIHSLI

SEQ ID NO: 30166 - protein, 9 aa, synthetic construct
GGLQIVPVF

SEQ ID NO: 30167 - protein, 10 aa, synthetic construct
GSMQKVLVWQ

SEQ ID NO: 30168 - protein, 9 aa, synthetic construct
KAIVSLGTL

SEQ ID NO: 30169 - protein, 11 aa, synthetic construct
LDGSMQKVLVW

SEQ ID NO: 30170 - protein, 9 aa, synthetic construct
RGTKAGVSY

SEQ ID NO: 30171 - protein, 11 aa, synthetic construct
DTVSAELSSPW

SEQ ID NO: 30172 - protein, 11 aa, synthetic construct
LADEVITVFSF

SEQ ID NO: 30173 - protein, 11 aa, synthetic construct
RTTKPNGLILF

SEQ ID NO: 30174 - protein, 9 aa, synthetic construct
FTSLTPLEL

SEQ ID NO: 30175 - protein, 8 aa, synthetic construct
SMQKVLVW

SEQ ID NO: 30176 - protein, 10 aa, synthetic construct
YKSKTEKYSF

SEQ ID NO: 30177 - protein, 10 aa, synthetic construct
RNSNYLRLLF

SEQ ID NO: 30178 - protein, 9 aa, synthetic construct
TVCDTIAQL

SEQ ID NO: 30179 - protein, 9 aa, synthetic construct
FLDYPDPVL

SEQ ID NO: 30180 - protein, 11 aa, synthetic construct
QAQILDKATEY

SEQ ID NO: 30181 - protein, 9 aa, synthetic construct
IAVLRGLIV

SEQ ID NO: 30182 - protein, 10 aa, synthetic construct
HMSEPPHSNM

SEQ ID NO: 30183 - protein, 9 aa, synthetic construct
RAHGQDLGM

SEQ ID NO: 30184 - protein, 9 aa, synthetic construct
MASNKCKRM

SEQ ID NO: 30185 - protein, 8 aa, synthetic construct
LSAMSFAY

SEQ ID NO: 30186 - protein, 9 aa, synthetic construct
LGGPGPSAL

SEQ ID NO: 30187 - protein, 8 aa, synthetic construct
TAFSIHSL

SEQ ID NO: 30188 - protein, 9 aa, synthetic construct
ITVFSFVGM

SEQ ID NO: 30189 - protein, 8 aa, synthetic construct
YSNYNLIL

SEQ ID NO: 30190 - protein, 8 aa, synthetic construct
GAFRNSNY

SEQ ID NO: 30191 - protein, 9 aa, synthetic construct
GAFRNSNYL

SEQ ID NO: 30192 - protein, 8 aa, synthetic construct
TSLTPLEL

SEQ ID NO: 30193 - protein, 9 aa, synthetic construct
EKYSFPHTY

SEQ ID NO: 30194 - protein, 8 aa, synthetic construct
YSFYNLIL

SEQ ID NO: 30195 - protein, 9 aa, synthetic construct
FRTTKPNGL

SEQ ID NO: 30196 - protein, 9 aa, synthetic construct
SRHRQLLSV

SEQ ID NO: 30197 - protein, 10 aa, synthetic construct
NYDIIKTYRY

SEQ ID NO: 30198 - protein, 10 aa, synthetic construct
DYPDPVLEPL

SEQ ID NO: 30199 - protein, 9 aa, synthetic construct
KHQLVRDSY

SEQ ID NO: 30200 - protein, 9 aa, synthetic construct
IKTYRYLYL

SEQ ID NO: 30201 - protein, 9 aa, synthetic construct
QRANAQTAV

SEQ ID NO: 30202 - protein, 9 aa, synthetic construct
TKPNGLILF

SEQ ID NO: 30203 - protein, 9 aa, synthetic construct
TYRYLYLAM

SEQ ID NO: 30204 - protein, 9 aa, synthetic construct
IRDGDFGVL

SEQ ID NO: 30205 - protein, 9 aa, synthetic construct
YRYLYLAML

SEQ ID NO: 30206 - protein, 11 aa, synthetic construct
FRTTKPNGLIL

SEQ ID NO: 30207 - protein, 11 aa, synthetic construct
IYKQTESDYSF

SEQ ID NO: 30208 - protein, 9 aa, synthetic construct
HHFDSSKIM

SEQ ID NO: 30209 - protein, 9 aa, synthetic construct
AFLRMVQAL

SEQ ID NO: 30210 - protein, 9 aa, synthetic construct
TWMKAIVSL

SEQ ID NO: 30211 - protein, 11 aa, synthetic construct
HRRGTKAGVSY

SEQ ID NO: 30212 - protein, 9 aa, synthetic construct
ERRQIATVM

SEQ ID NO: 30213 - protein, 9 aa, synthetic construct
LWVGGSLVL

SEQ ID NO: 30214 - protein, 9 aa, synthetic construct
DYSNYNLIL

SEQ ID NO: 30215 - protein, 9 aa, synthetic construct
DYSFYNLIL

SEQ ID NO: 30216 - protein, 10 aa, synthetic construct
TEKYSFPHTY

SEQ ID NO: 30217 - protein, 9 aa, synthetic construct
GHPLSAMSF

SEQ ID NO: 30218 - protein, 8 aa, synthetic construct
YRYLYLAM

SEQ ID NO: 30219 - protein, 10 aa, synthetic construct
FRNSNYLRLL

SEQ ID NO: 30220 - protein, 11 aa, synthetic construct
FRNSNYLRLLF

SEQ ID NO: 30221 - protein, 9 aa, synthetic construct
LYKSKTEKY

SEQ ID NO: 30222 - protein, 9 aa, synthetic construct
FRNSNYLRL

SEQ ID NO: 30223 - protein, 8 aa, synthetic construct
RRQIATVM

SEQ ID NO: 30224 - protein, 10 aa, synthetic construct
RRGTKAGVSY

SEQ ID NO: 30225 - protein, 9 aa, synthetic construct
GYIKCKRML

SEQ ID NO: 30226 - protein, 10 aa, synthetic construct
SGHPLSAMSF

SEQ ID NO: 30227 - protein, 15 aa, synthetic construct
CGKAFKLFSTLTRHK

SEQ ID NO: 30228 - protein, 15 aa, synthetic construct
VPSLQGEKASQAQIL

SEQ ID NO: 30229 - protein, 15 aa, synthetic construct
AFLRMVQALLSNSSM

SEQ ID NO: 30230 - protein, 15 aa, synthetic construct
FLRMVQALLSNSSML

SEQ ID NO: 30231 - protein, 15 aa, synthetic construct
RHSVSEMASNKCKRM

SEQ ID NO: 30232 - protein, 15 aa, synthetic construct
TRHSVSEMASNKCKR

SEQ ID NO: 30233 - protein, 15 aa, synthetic construct
SMQKVLVWQNLDSPR

SEQ ID NO: 30234 - protein, 15 aa, synthetic construct
PPPYLRTESHQHQHQ

SEQ ID NO: 30235 - protein, 15 aa, synthetic construct
TSGIIASKDTTPSII

SEQ ID NO: 30236 - protein, 15 aa, synthetic construct
LRMVQALLSNSSMLP

SEQ ID NO: 30237 - protein, 15 aa, synthetic construct
AIVSLGTLGDRMAAM

SEQ ID NO: 30238 - protein, 15 aa, synthetic construct
VGDVHHFDSSKIMEE

SEQ ID NO: 30239 - protein, 15 aa, synthetic construct
SLTPLELQSLDVGNV

SEQ ID NO: 30240 - protein, 15 aa, synthetic construct
GLQIVPVFIQDAGNY

SEQ ID NO: 30241 - protein, 15 aa, synthetic construct
ADFCILRIRTKGGNS

SEQ ID NO: 30242 - protein, 15 aa, synthetic construct
DFCILRIRTKGGNSA

SEQ ID NO: 30243 - protein, 15 aa, synthetic construct
FDALNLDDDSHERYS

SEQ ID NO: 30244 - protein, 15 aa, synthetic construct
MKAIVSLGTLGDRMA

SEQ ID NO: 30245 - protein, 15 aa, synthetic construct
MQKVLVWQNLDSPRA

SEQ ID NO: 30246 - protein, 15 aa, synthetic construct
PPPLQTAPAPLTTPP

SEQ ID NO: 30247 - protein, 15 aa, synthetic construct
STWMKAIVSLGTLGD

SEQ ID NO: 30248 - protein, 15 aa, synthetic construct
ECGKAFKLFSTLTRH

SEQ ID NO: 30249 - protein, 15 aa, synthetic construct
TWMKAIVSLGTLGDR

SEQ ID NO: 30250 - protein, 15 aa, synthetic construct
DGYYRGERTQDEEEG

SEQ ID NO: 30251 - protein, 15 aa, synthetic construct
EERRQIATVMSRAQG

SEQ ID NO: 30252 - protein, 15 aa, synthetic construct
ESGGLQIVPVFIQDA

SEQ ID NO: 30253 - protein, 15 aa, synthetic construct
RMVQALLSNSSMLPT

SEQ ID NO: 30254 - protein, 15 aa, synthetic construct
ADEVITVFSFVGMDS

SEQ ID NO: 30255 - protein, 15 aa, synthetic construct
HSVSEMASNKCKRML

SEQ ID NO: 30256 - protein, 15 aa, synthetic construct
CKRMLNRELTHLSEM

SEQ ID NO: 30257 - protein, 15 aa, synthetic construct
KAIVSLGTLGDRMAA

SEQ ID NO: 30258 - protein, 15 aa, synthetic construct
TPSIIVASGNIGSEL

SEQ ID NO: 30259 - protein, 15 aa, synthetic construct
SGGLQIVPVFIQDAG

SEQ ID NO: 30260 - protein, 15 aa, synthetic construct
PPPVQSHPPIIAATP

SEQ ID NO: 30261 - protein, 15 aa, synthetic construct
KCKRMLNRELTHLSE

SEQ ID NO: 30262 - protein, 15 aa, synthetic construct
SGIIASKDTTPSIIV

SEQ ID NO: 30263 - protein, 15 aa, synthetic construct
ELAIYKQTESDYSNY

SEQ ID NO: 30264 - protein, 15 aa, synthetic construct
LAIYKQTESDYSFYN

SEQ ID NO: 30265 - protein, 15 aa, synthetic construct
DRENYDIIKTYRYLY

SEQ ID NO: 30266 - protein, 15 aa, synthetic construct
KAFKLFSTLTRHKRI

SEQ ID NO: 30267 - protein, 15 aa, synthetic construct
LAIYKQTESDYSNYN

SEQ ID NO: 30268 - protein, 15 aa, synthetic construct
GVLKREDVFKAVQVQ

SEQ ID NO: 30269 - protein, 15 aa, synthetic construct
GDFGVLKREDVFKAV

SEQ ID NO: 30270 - protein, 15 aa, synthetic construct
TTPSIIVASGNIGSE

SEQ ID NO: 30271 - protein, 15 aa, synthetic construct
EQAFLRMVQALLSNS

SEQ ID NO: 30272 - protein, 15 aa, synthetic construct
IHSLIGSPPQPSPGH

SEQ ID NO: 30273 - protein, 15 aa, synthetic construct
EEQPRFQSAASQAQI

SEQ ID NO: 30274 - protein, 15 aa, synthetic construct
TPLELQSLDVGNVTA

SEQ ID NO: 30275 - protein, 15 aa, synthetic construct
SRHRQLLSVAATPAA

SEQ ID NO: 30276 - protein, 15 aa, synthetic construct
QKVLVWQNLDSPRAI

SEQ ID NO: 30277 - protein, 15 aa, synthetic construct
QAFLRMVQALLSNSS

SEQ ID NO: 30278 - protein, 15 aa, synthetic construct
QTRHSVSEMASNKCK

SEQ ID NO: 30279 - protein, 15 aa, synthetic construct
IAVLRGLIVPEIRGN

SEQ ID NO: 30280 - protein, 15 aa, synthetic construct
SEQAFLRMVQALLSN

SEQ ID NO: 30281 - protein, 15 aa, synthetic construct
EQPRFQSAASQAQIL

SEQ ID NO: 30282 - protein, 15 aa, synthetic construct
PRFQSAASQAQILDK

SEQ ID NO: 30283 - protein, 15 aa, synthetic construct
RQIATVMSRAQGLPK

SEQ ID NO: 30284 - protein, 15 aa, synthetic construct
PYTSGIIASKDTTPS

SEQ ID NO: 30285 - protein, 15 aa, synthetic construct
YTSGIIASKDTTPSI

SEQ ID NO: 30286 - protein, 15 aa, synthetic construct
GKAFKLFSTLTRHKR

SEQ ID NO: 30287 - protein, 15 aa, synthetic construct
GGLQIVPVFIQDAGN

SEQ ID NO: 30288 - protein, 15 aa, synthetic construct
DTTPSIIVASGNIGS

SEQ ID NO: 30289 - protein, 15 aa, synthetic construct
QPRFQSAASQAQILD

SEQ ID NO: 30290 - protein, 15 aa, synthetic construct
RRQIATVMSRAQGLP

SEQ ID NO: 30291 - protein, 15 aa, synthetic construct
FGVLKREDVFKAVQV

SEQ ID NO: 30292 - protein, 15 aa, synthetic construct
GSMQKVLVWQNLDSP

SEQ ID NO: 30293 - protein, 15 aa, synthetic construct
PEALSPAFSEDSEPH

SEQ ID NO: 30294 - protein, 15 aa, synthetic construct
SDGYYRGERTQDEEE

SEQ ID NO: 30295 - protein, 15 aa, synthetic construct
AGVSYRPAEVAETGA

SEQ ID NO: 30296 - protein, 15 aa, synthetic construct
LESGGLQIVPVFIQD

SEQ ID NO: 30297 - protein, 15 aa, synthetic construct
SVPSLQGEKASQAQI

SEQ ID NO: 30298 - protein, 15 aa, synthetic construct
RHRQLLSVAATPAAL

SEQ ID NO: 30299 - protein, 15 aa, synthetic construct
LTPLELQSLDVGNVT

SEQ ID NO: 30300 - protein, 15 aa, synthetic construct
DFGVLKREDVFKAVQ

SEQ ID NO: 30301 - protein, 15 aa, synthetic construct
WMKAIVSLGTLGDRM

SEQ ID NO: 30302 - protein, 15 aa, synthetic construct
ERRQIATVMSRAQGL

SEQ ID NO: 30303 - protein, 15 aa, synthetic construct
RSLLVLNSTSFLDYP

SEQ ID NO: 30304 - protein, 15 aa, synthetic construct
NYNLILKKAGQFLDN

SEQ ID NO: 30305 - protein, 15 aa, synthetic construct
RENYDIIKTYRYLYL

SEQ ID NO: 30306 - protein, 15 aa, synthetic construct
KTADWKGEKRASELA

SEQ ID NO: 30307 - protein, 15 aa, synthetic construct
FYNLILKKAGQFLDN

SEQ ID NO: 30308 - protein, 15 aa, synthetic construct
KVLYKSKTEKYSFPH

SEQ ID NO: 30309 - protein, 15 aa, synthetic construct
SQAQILDKATEYIQY

SEQ ID NO: 30310 - protein, 15 aa, synthetic construct
ANVSLHRNPATLKLW

SEQ ID NO: 30311 - protein, 15 aa, synthetic construct
SLLVLNSTSFLDYPD

SEQ ID NO: 30312 - protein, 15 aa, synthetic construct
PKVLYKSKTEKYSFP

SEQ ID NO: 30313 - protein, 15 aa, synthetic construct
PPYLRTESHQHQHQH

SEQ ID NO: 30314 - protein, 15 aa, synthetic construct
KLFSTLTRHKRIHTG

SEQ ID NO: 30315 - protein, 15 aa, synthetic construct
SENGLVRSPKSAGSR

SEQ ID NO: 30316 - protein, 15 aa, synthetic construct
MANVSLHRNPATLKL

SEQ ID NO: 30317 - protein, 15 aa, synthetic construct
FKLFSTLTRHKRIHT

SEQ ID NO: 30318 - protein, 15 aa, synthetic construct
NVRSLLVLNSTSFLD

SEQ ID NO: 30319 - protein, 15 aa, synthetic construct
DYSNYNLILKKAGQF

SEQ ID NO: 30320 - protein, 15 aa, synthetic construct
AFKLFSTLTRHKRIH

SEQ ID NO: 30321 - protein, 15 aa, synthetic construct
ENYDIIKTYRYLYLA

SEQ ID NO: 30322 - protein, 15 aa, synthetic construct
IPKVLYKSKTEKYSF

SEQ ID NO: 30323 - protein, 15 aa, synthetic construct
LGIPKVLYKSKTEKY

SEQ ID NO: 30324 - protein, 15 aa, synthetic construct
YSNYNLILKKAGQFL

SEQ ID NO: 30325 - protein, 15 aa, synthetic construct
KPNGLILFSHGKPRH

SEQ ID NO: 30326 - protein, 15 aa, synthetic construct
GIPKVLYKSKTEKYS

SEQ ID NO: 30327 - protein, 15 aa, synthetic construct
RCVETLVVADKMMVG

SEQ ID NO: 30328 - protein, 15 aa, synthetic construct
NDRENYDIIKTYRYL

SEQ ID NO: 30329 - protein, 15 aa, synthetic construct
TADWKGEKRASELAK

SEQ ID NO: 30330 - protein, 15 aa, synthetic construct
CVETLVVADKMMVGY

SEQ ID NO: 30331 - protein, 15 aa, synthetic construct
NVSLHRNPATLKLWN

SEQ ID NO: 30332 - protein, 15 aa, synthetic construct
VLRGLIVPEIRGNET

SEQ ID NO: 30333 - protein, 15 aa, synthetic construct
VRSLLVLNSTSFLDY

SEQ ID NO: 30334 - protein, 15 aa, synthetic construct
GPPPYLRTESHQHQH

SEQ ID NO: 30335 - protein, 15 aa, synthetic construct
YAPLIAVLRGLIVPE

SEQ ID NO: 30336 - protein, 15 aa, synthetic construct
NYDIIKTYRYLYLAM

SEQ ID NO: 30337 - protein, 15 aa, synthetic construct
DGDFGVLKREDVFKA

SEQ ID NO: 30338 - protein, 15 aa, synthetic construct
ENGLVRSPKSAGSRT

SEQ ID NO: 30339 - protein, 15 aa, synthetic construct
RDGDFGVLKREDVFK

SEQ ID NO: 30340 - protein, 15 aa, synthetic construct
EKSVVGSGSWQRANA

SEQ ID NO: 30341 - protein, 15 aa, synthetic construct
PAPPPVQSHPPIIAA

SEQ ID NO: 30342 - protein, 15 aa, synthetic construct
SGSWQRANAQTAVRS

SEQ ID NO: 30343 - protein, 15 aa, synthetic construct
TGSISFDFRTTKPNG

SEQ ID NO: 30344 - protein, 15 aa, synthetic construct
RGLIVPEIRGNETVP

SEQ ID NO: 30345 - protein, 15 aa, synthetic construct
SSENGLVRSPKSAGS

SEQ ID NO: 30346 - protein, 15 aa, synthetic construct
NGLVRSPKSAGSRTS

SEQ ID NO: 30347 - protein, 15 aa, synthetic construct
APPPVQSHPPIIAAT

SEQ ID NO: 30348 - protein, 15 aa, synthetic construct
LRGLIVPEIRGNETV

SEQ ID NO: 30349 - protein, 15 aa, synthetic construct
SNYNLILKKAGQFLD

SEQ ID NO: 30350 - protein, 15 aa, synthetic construct
EPLGTDTVSAELSSP

SEQ ID NO: 30351 - protein, 15 aa, synthetic construct
ENPYTSGIIASKDTT

SEQ ID NO: 30352 - protein, 15 aa, synthetic construct
EEEAQLEEIEETEGE

SEQ ID NO: 30353 - protein, 15 aa, synthetic construct
PLSAMSFAYAAGAGQ

SEQ ID NO: 30354 - protein, 15 aa, synthetic construct
GDVHHFDSSKIMEEH

SEQ ID NO: 30355 - protein, 15 aa, synthetic construct
DIDTFTSLTPLELQS

SEQ ID NO: 30356 - protein, 15 aa, synthetic construct
KAGVSYRPAEVAETG

SEQ ID NO: 30357 - protein, 15 aa, synthetic construct
GVGDVHHFDSSKIME

SEQ ID NO: 30358 - protein, 15 aa, synthetic construct
ALQALKGSQDSSENG

SEQ ID NO: 30359 - protein, 15 aa, synthetic construct
GYYRGERTQDEEEGG

SEQ ID NO: 30360 - protein, 15 aa, synthetic construct
YYRGERTQDEEEGGA

SEQ ID NO: 30361 - protein, 15 aa, synthetic construct
RQHRRGTKAGVSYRP

SEQ ID NO: 30362 - protein, 15 aa, synthetic construct
NSVSAVSIEEGAFRN

SEQ ID NO: 30363 - protein, 15 aa, synthetic construct
PSDGYYRGERTQDEE

SEQ ID NO: 30364 - protein, 15 aa, synthetic construct
DEEQPRFQSAASQAQ

SEQ ID NO: 30365 - protein, 15 aa, synthetic construct
GSWQRANAQTAVRSP

SEQ ID NO: 30366 - protein, 15 aa, synthetic construct
SLQGEKASQAQILDK

SEQ ID NO: 30367 - protein, 15 aa, synthetic construct
SGGFDALNLDDDSHE

SEQ ID NO: 30368 - protein, 15 aa, synthetic construct
GSGSWQRANAQTAVR

SEQ ID NO: 30369 - protein, 15 aa, synthetic construct
NPYTSGIIASKDTTP

SEQ ID NO: 30370 - protein, 15 aa, synthetic construct
SIHSLIGSPPQPSPG

SEQ ID NO: 30371 - protein, 15 aa, synthetic construct
EEAQLEEIEETEGEG

SEQ ID NO: 30372 - protein, 15 aa, synthetic construct
LQGEKASQAQILDKA

SEQ ID NO: 30373 - protein, 15 aa, synthetic construct
TKAGVSYRPAEVAET

SEQ ID NO: 30374 - protein, 15 aa, synthetic construct
LQALKGSQDSSENGL

SEQ ID NO: 30375 - protein, 15 aa, synthetic construct
LIAVLRGLIVPEIRG

SEQ ID NO: 30376 - protein, 15 aa, synthetic construct
ASSNSSGDALVTRIS

SEQ ID NO: 30377 - protein, 15 aa, synthetic construct
GGFDALNLDDDSHER

SEQ ID NO: 30378 - protein, 15 aa, synthetic construct
SASSNSSGDALVTRI

SEQ ID NO: 30379 - protein, 15 aa, synthetic construct
LNSTSFLDYPDPVLE

SEQ ID NO: 30380 - protein, 15 aa, synthetic construct
RFQSAASQAQILDKA

SEQ ID NO: 30381 - protein, 15 aa, synthetic construct
GSASSNSSGDALVTR

SEQ ID NO: 30382 - protein, 15 aa, synthetic construct
LLVLNSTSFLDYPDP

SEQ ID NO: 30383 - protein, 15 aa, synthetic construct
LVLNSTSFLDYPDPV

SEQ ID NO: 30384 - protein, 15 aa, synthetic construct
QALKGSQDSSENGLV

SEQ ID NO: 30385 - protein, 15 aa, synthetic construct
DVHHFDSSKIMEEHS

SEQ ID NO: 30386 - protein, 15 aa, synthetic construct
VLNSTSFLDYPDPVL

SEQ ID NO: 30387 - protein, 15 aa, synthetic construct
SGSASSNSSGDALVT

SEQ ID NO: 30388 - protein, 15 aa, synthetic construct
GSCSSNSSGDALVTR

SEQ ID NO: 30389 - protein, 15 aa, synthetic construct
EDNDSGGFDALNLDD

SEQ ID NO: 30390 - protein, 15 aa, synthetic construct
NDSGGFDALNLDDDS

SEQ ID NO: 30391 - protein, 15 aa, synthetic construct
DNDSGGFDALNLDDD

SEQ ID NO: 30392 - protein, 15 aa, synthetic construct
VGSGSWQRANAQTAV

SEQ ID NO: 30393 - protein, 15 aa, synthetic construct
VFSFVGMDSDWLMGE

SEQ ID NO: 30394 - protein, 15 aa, synthetic construct
TVFSFVGMDSDWLMG

SEQ ID NO: 30395 - protein, 15 aa, synthetic construct
IEETEGEGLQEEGVQ

SEQ ID NO: 30396 - protein, 15 aa, synthetic construct
SVSAVSIEEGAFRNS

SEQ ID NO: 30397 - protein, 15 aa, synthetic construct
FQSAASQAQILDKAT

SEQ ID NO: 30398 - protein, 15 aa, synthetic construct
EEIEETEGEGLQEEG

SEQ ID NO: 30399 - protein, 15 aa, synthetic construct
PLGTDTVSAELSSPW

SEQ ID NO: 30400 - protein, 15 aa, synthetic construct
SEPLGTDTVSAELSS

SEQ ID NO: 30401 - protein, 15 aa, synthetic construct
SMDIDTFTSLTPLEL

SEQ ID NO: 30402 - protein, 15 aa, synthetic construct
DSGGFDALNLDDDSH

SEQ ID NO: 30403 - protein, 15 aa, synthetic construct
ITVFSFVGMDSDWLM

SEQ ID NO: 30404 - protein, 15 aa, synthetic construct
EIEETEGEGLQEEGV

SEQ ID NO: 30405 - protein, 15 aa, synthetic construct
SEDSEPHGSSSASSP

SEQ ID NO: 30406 - protein, 15 aa, synthetic construct
EGEGLQEEGVQLEEV

SEQ ID NO: 30407 - protein, 15 aa, synthetic construct
VHHFDSSKIMEEHSY

SEQ ID NO: 30408 - protein, 15 aa, synthetic construct
LGTDTVSAELSSPWA

SEQ ID NO: 30409 - protein, 15 aa, synthetic construct
DEVITVFSFVGMDSD

SEQ ID NO: 30410 - protein, 15 aa, synthetic construct
TSEPLGTDTVSAELS

SEQ ID NO: 30411 - protein, 15 aa, synthetic construct
GFDALNLDDDSHERY

SEQ ID NO: 30412 - protein, 15 aa, synthetic construct
SFVGMDSDWLMGERG

SEQ ID NO: 30413 - protein, 15 aa, synthetic construct
FSFVGMDSDWLMGER

SEQ ID NO: 30414 - protein, 15 aa, synthetic construct
VVGSGSWQRANAQTA

SEQ ID NO: 30415 - protein, 15 aa, synthetic construct
EDSEPHGSSSASSPL

SEQ ID NO: 30416 - protein, 15 aa, synthetic construct
IDTFTSLTPLELQSL

SEQ ID NO: 30417 - protein, 15 aa, synthetic construct
DSEPHGSSSASSPLS

SEQ ID NO: 30418 - protein, 15 aa, synthetic construct
QQEEEAQLEEIEETE

SEQ ID NO: 30419 - protein, 15 aa, synthetic construct
QEEEAQLEEIEETEG

SEQ ID NO: 30420 - protein, 15 aa, synthetic construct
LQIVPVFIQDAGNYT

SEQ ID NO: 30421 - protein, 15 aa, synthetic construct
MDIDTFTSLTPLELQ

SEQ ID NO: 30422 - protein, 15 aa, synthetic construct
DTFTSLTPLELQSLD

SEQ ID NO: 30423 - protein, 15 aa, synthetic construct
SWQRANAQTAVRSPR

SEQ ID NO: 30424 - protein, 15 aa, synthetic construct
SAMSFAYAAGAGQLR

SEQ ID NO: 30425 - protein, 15 aa, synthetic construct
MQRPLGSSTAFSIHS

SEQ ID NO: 30426 - protein, 15 aa, synthetic construct
SISFDFRTTKPNGLI

SEQ ID NO: 30427 - protein, 15 aa, synthetic construct
PSLQGEKASQAQILD

SEQ ID NO: 30428 - protein, 15 aa, synthetic construct
AMSFAYAAGAGQLRA

SEQ ID NO: 30429 - protein, 15 aa, synthetic construct
LSAMSFAYAAGAGQL

SEQ ID NO: 30430 - protein, 15 aa, synthetic construct
SFDFRTTKPNGLILF

SEQ ID NO: 30431 - protein, 15 aa, synthetic construct
QELAIYKQTESDYSN

SEQ ID NO: 30432 - protein, 15 aa, synthetic construct
GSISFDFRTTKPNGL

SEQ ID NO: 30433 - protein, 15 aa, synthetic construct
FSIHSLIGSPPQPSP

SEQ ID NO: 30434 - protein, 15 aa, synthetic construct
APPPLQTAPAPLTTP

SEQ ID NO: 30435 - protein, 15 aa, synthetic construct
DGVGDVHHFDSSKIM

SEQ ID NO: 30436 - protein, 15 aa, synthetic construct
QGEKASQAQILDKAT

SEQ ID NO: 30437 - protein, 15 aa, synthetic construct
WQRANAQTAVRSPRY

SEQ ID NO: 30438 - protein, 15 aa, synthetic construct
ISFDFRTTKPNGLIL

SEQ ID NO: 30439 - protein, 10 aa, synthetic construct
IPREDKNNFF

SEQ ID NO: 30440 - protein, 8 aa, synthetic construct
NFFDRHCF

SEQ ID NO: 30441 - protein, 10 aa, synthetic construct
ILNKTGKILL

SEQ ID NO: 30442 - protein, 9 aa, synthetic construct
NMFISLPRV

SEQ ID NO: 30443 - protein, 9 aa, synthetic construct
LLLAALQGL

SEQ ID NO: 30444 - protein, 9 aa, synthetic construct
LLVKDIYFL

SEQ ID NO: 30445 - protein, 9 aa, synthetic construct
LVGSNITFV

SEQ ID NO: 30446 - protein, 9 aa, synthetic construct
SVAQVVAEM

SEQ ID NO: 30447 - protein, 9 aa, synthetic construct
IVLSAPEWL

SEQ ID NO: 30448 - protein, 11 aa, synthetic construct
TQSELPPSFAV

SEQ ID NO: 30449 - protein, 9 aa, synthetic construct
HLEQPHQQL

SEQ ID NO: 30450 - protein, 9 aa, synthetic construct
IQFHAESFL

SEQ ID NO: 30451 - protein, 9 aa, synthetic construct
WMLDDYEEI

SEQ ID NO: 30452 - protein, 9 aa, synthetic construct
YMQGYPSKV

SEQ ID NO: 30453 - protein, 10 aa, synthetic construct
RIMPGAFRNL

SEQ ID NO: 30454 - protein, 9 aa, synthetic construct
SLPRVKELL

SEQ ID NO: 30455 - protein, 10 aa, synthetic construct
GLGDRWFQRV

SEQ ID NO: 30456 - protein, 11 aa, synthetic construct
RVWMLDDYEEI

SEQ ID NO: 30457 - protein, 9 aa, synthetic construct
VMKTMPFFL

SEQ ID NO: 30458 - protein, 9 aa, synthetic construct
SELEHLTEL

SEQ ID NO: 30459 - protein, 11 aa, synthetic construct
YMQGYPSKVHI

SEQ ID NO: 30460 - protein, 10 aa, synthetic construct
YALHDVTDKI

SEQ ID NO: 30461 - protein, 11 aa, synthetic construct
KDLLLAALQGL

SEQ ID NO: 30462 - protein, 9 aa, synthetic construct
KLEDGQKNI

SEQ ID NO: 30463 - protein, 10 aa, synthetic construct
SNMFISLPRV

SEQ ID NO: 30464 - protein, 11 aa, synthetic construct
VQSELEHLTEL

SEQ ID NO: 30465 - protein, 9 aa, synthetic construct
SIEEAVPAL

SEQ ID NO: 30466 - protein, 8 aa, synthetic construct
FLYSKFTV

SEQ ID NO: 30467 - protein, 9 aa, synthetic construct
ALDEETSSL

SEQ ID NO: 30468 - protein, 10 aa, synthetic construct
KLDDDSERKL

SEQ ID NO: 30469 - protein, 11 aa, synthetic construct
FNLLVKDIYFL

SEQ ID NO: 30470 - protein, 9 aa, synthetic construct
IMPGAFRNL

SEQ ID NO: 30471 - protein, 9 aa, synthetic construct
YMSRTPHWA

SEQ ID NO: 30472 - protein, 9 aa, synthetic construct
RLPLAVHCA

SEQ ID NO: 30473 - protein, 10 aa, synthetic construct
ALDEETSSLL

SEQ ID NO: 30474 - protein, 9 aa, synthetic construct
IVPDSEQRL

SEQ ID NO: 30475 - protein, 9 aa, synthetic construct
LLGGFSLVL

SEQ ID NO: 30476 - protein, 9 aa, synthetic construct
VIPVFNLLV

SEQ ID NO: 30477 - protein, 11 aa, synthetic construct
KLAKGTVQTGV

SEQ ID NO: 30478 - protein, 10 aa, synthetic construct
NLLVKDIYFL

SEQ ID NO: 30479 - protein, 11 aa, synthetic construct
FLSDSNMFISL

SEQ ID NO: 30480 - protein, 9 aa, synthetic construct
SMDTTKTVL

SEQ ID NO: 30481 - protein, 9 aa, synthetic construct
IVIPVFNLL

SEQ ID NO: 30482 - protein, 9 aa, synthetic construct
LLLGGFSLV

SEQ ID NO: 30483 - protein, 9 aa, synthetic construct
KLVKMILKL

SEQ ID NO: 30484 - protein, 11 aa, synthetic construct
KLEDGQKNIRL

SEQ ID NO: 30485 - protein, 11 aa, synthetic construct
TLQPGMRVWML

SEQ ID NO: 30486 - protein, 9 aa, synthetic construct
VMGNIIIEL

SEQ ID NO: 30487 - protein, 11 aa, synthetic construct
ALHDVTDKIPM

SEQ ID NO: 30488 - protein, 10 aa, synthetic construct
LLLGGFSLVL

SEQ ID NO: 30489 - protein, 10 aa, synthetic construct
LLLLGGFSLV

SEQ ID NO: 30490 - protein, 11 aa, synthetic construct
ALVGSNITFVV

SEQ ID NO: 30491 - protein, 10 aa, synthetic construct
ALVGSNITFV

SEQ ID NO: 30492 - protein, 9 aa, synthetic construct
AVENYLIQI

SEQ ID NO: 30493 - protein, 11 aa, synthetic construct
GLPPHYPLSQL

SEQ ID NO: 30494 - protein, 9 aa, synthetic construct
ALHDVTDKI

SEQ ID NO: 30495 - protein, 10 aa, synthetic construct
YMSRTPHWAL

SEQ ID NO: 30496 - protein, 10 aa, synthetic construct
GVMGNIIIEL

SEQ ID NO: 30497 - protein, 9 aa, synthetic construct
RLLKKLFSA

SEQ ID NO: 30498 - protein, 11 aa, synthetic construct
KLDDDSERKLV

SEQ ID NO: 30499 - protein, 9 aa, synthetic construct
RLATDLDGM

SEQ ID NO: 30500 - protein, 10 aa, synthetic construct
MVYEGNARDL

SEQ ID NO: 30501 - protein, 11 aa, synthetic construct
KLAKGTVQTSM

SEQ ID NO: 30502 - protein, 9 aa, synthetic construct
GSNGEVPNV

SEQ ID NO: 30503 - protein, 10 aa, synthetic construct
LFSAYNKWSR

SEQ ID NO: 30504 - protein, 11 aa, synthetic construct
RDLIKGEAETR

SEQ ID NO: 30505 - protein, 9 aa, synthetic construct
QYMQGYPSK

SEQ ID NO: 30506 - protein, 9 aa, synthetic construct
PMNEHNAYR

SEQ ID NO: 30507 - protein, 10 aa, synthetic construct
RGKASSSGKR

SEQ ID NO: 30508 - protein, 11 aa, synthetic construct
VTPDTKALLER

SEQ ID NO: 30509 - protein, 10 aa, synthetic construct
MGLGVTSSMR

SEQ ID NO: 30510 - protein, 10 aa, synthetic construct
KSYTEEKPYK

SEQ ID NO: 30511 - protein, 11 aa, synthetic construct
KSRKLTLLHSK

SEQ ID NO: 30512 - protein, 11 aa, synthetic construct
KGNGKLPGTSR

SEQ ID NO: 30513 - protein, 10 aa, synthetic construct
TFSAKDYMSR

SEQ ID NO: 30514 - protein, 8 aa, synthetic construct
SAYNKWSR

SEQ ID NO: 30515 - protein, 11 aa, synthetic construct
KANEHDAIPIR

SEQ ID NO: 30516 - protein, 11 aa, synthetic construct
ASQLDKPRLNR

SEQ ID NO: 30517 - protein, 9 aa, synthetic construct
SYTEEKPYK

SEQ ID NO: 30518 - protein, 9 aa, synthetic construct
KEFSGTPAR

SEQ ID NO: 30519 - protein, 9 aa, synthetic construct
LIKGEAETR

SEQ ID NO: 30520 - protein, 10 aa, synthetic construct
TFVVNLIFPR

SEQ ID NO: 30521 - protein, 10 aa, synthetic construct
IPMNEHNAYR

SEQ ID NO: 30522 - protein, 9 aa, synthetic construct
NGKLPGTSR

SEQ ID NO: 30523 - protein, 10 aa, synthetic construct
YSKFTVDKSR

SEQ ID NO: 30524 - protein, 9 aa, synthetic construct
KTGKILLEK

SEQ ID NO: 30525 - protein, 9 aa, synthetic construct
SFQPDTDNR

SEQ ID NO: 30526 - protein, 11 aa, synthetic construct
YFKGEFPPYLK

SEQ ID NO: 30527 - protein, 11 aa, synthetic construct
SVAQVVAEMWR

SEQ ID NO: 30528 - protein, 10 aa, synthetic construct
AAASQLDKPR

SEQ ID NO: 30529 - protein, 11 aa, synthetic construct
LLKIVPDSEQR

SEQ ID NO: 30530 - protein, 9 aa, synthetic construct
AVPALCKTR

SEQ ID NO: 30531 - protein, 10 aa, synthetic construct
AYVPMAVGSR

SEQ ID NO: 30532 - protein, 9 aa, synthetic construct
ENYLIQIAR

SEQ ID NO: 30533 - protein, 10 aa, synthetic construct
GNGKLPGTSR

SEQ ID NO: 30534 - protein, 9 aa, synthetic construct
AASQLDKPR

SEQ ID NO: 30535 - protein, 11 aa, synthetic construct
KTFSAKDYMSR

SEQ ID NO: 30536 - protein, 9 aa, synthetic construct
SRIMPGAFR

SEQ ID NO: 30537 - protein, 10 aa, synthetic construct
ALHQSGQIER

SEQ ID NO: 30538 - protein, 10 aa, synthetic construct
LVKDIYFLHK

SEQ ID NO: 30539 - protein, 10 aa, synthetic construct
QFHAESFLYR

SEQ ID NO: 30540 - protein, 9 aa, synthetic construct
MFISLPRVK

SEQ ID NO: 30541 - protein, 11 aa, synthetic construct
VVHKPSAMPSR

SEQ ID NO: 30542 - protein, 10 aa, synthetic construct
LGFEKVEQLR

SEQ ID NO: 30543 - protein, 11 aa, synthetic construct
IQFHAESFLYR

SEQ ID NO: 30544 - protein, 11 aa, synthetic construct
SNSSHLMGHGR

SEQ ID NO: 30545 - protein, 9 aa, synthetic construct
SNMFISLPR

SEQ ID NO: 30546 - protein, 9 aa, synthetic construct
FVVNLIFPR

SEQ ID NO: 30547 - protein, 10 aa, synthetic construct
VSFQPDTDNR

SEQ ID NO: 30548 - protein, 9 aa, synthetic construct
RWFQRVEDR

SEQ ID NO: 30549 - protein, 9 aa, synthetic construct
KIVPDSEQR

SEQ ID NO: 30550 - protein, 8 aa, synthetic construct
RIMPGAFR

SEQ ID NO: 30551 - protein, 9 aa, synthetic construct
SSHLMGHGR

SEQ ID NO: 30552 - protein, 10 aa, synthetic construct
TSRDIQTAVR

SEQ ID NO: 30553 - protein, 10 aa, synthetic construct
QTGPVPPGRR

SEQ ID NO: 30554 - protein, 9 aa, synthetic construct
GLGDRWFQR

SEQ ID NO: 30555 - protein, 9 aa, synthetic construct
AAKNASLLK

SEQ ID NO: 30556 - protein, 8 aa, synthetic construct
VVNLIFPR

SEQ ID NO: 30557 - protein, 10 aa, synthetic construct
VHKPSAMPSR

SEQ ID NO: 30558 - protein, 9 aa, synthetic construct
KGKFYNFNK

SEQ ID NO: 30559 - protein, 9 aa, synthetic construct
HSTTPLPRR

SEQ ID NO: 30560 - protein, 10 aa, synthetic construct
YGLGDRWFQR

SEQ ID NO: 30561 - protein, 11 aa, synthetic construct
LYSKFTVDKSR

SEQ ID NO: 30562 - protein, 11 aa, synthetic construct
AVENYLIQIAR

SEQ ID NO: 30563 - protein, 11 aa, synthetic construct
KLFSAYNKWSR

SEQ ID NO: 30564 - protein, 11 aa, synthetic construct
ITFVVNLIFPR

SEQ ID NO: 30565 - protein, 9 aa, synthetic construct
FSAKDYMSR

SEQ ID NO: 30566 - protein, 9 aa, synthetic construct
GFEKVEQLR

SEQ ID NO: 30567 - protein, 11 aa, synthetic construct
TMPPPPVSGSR

SEQ ID NO: 30568 - protein, 11 aa, synthetic construct
ALRLESTYQNR

SEQ ID NO: 30569 - protein, 9 aa, synthetic construct
FSAYNKWSR

SEQ ID NO: 30570 - protein, 8 aa, synthetic construct
STTPLPRR

SEQ ID NO: 30571 - protein, 9 aa, synthetic construct
LVKDIYFLH

SEQ ID NO: 30572 - protein, 11 aa, synthetic construct
LIPMNEHNAYR

SEQ ID NO: 30573 - protein, 9 aa, synthetic construct
KSRKLTLLH

SEQ ID NO: 30574 - protein, 9 aa, synthetic construct
CLFHGNYSR

SEQ ID NO: 30575 - protein, 10 aa, synthetic construct
LSRIMPGAFR

SEQ ID NO: 30576 - protein, 11 aa, synthetic construct
GEARPSTPQRK

SEQ ID NO: 30577 - protein, 9 aa, synthetic construct
ERKLVKMIL

SEQ ID NO: 30578 - protein, 11 aa, synthetic construct
SRDIQTAVRLL

SEQ ID NO: 30579 - protein, 10 aa, synthetic construct
SRDIQTAVRL

SEQ ID NO: 30580 - protein, 10 aa, synthetic construct
GRGAFEAAGF

SEQ ID NO: 30581 - protein, 11 aa, synthetic construct
HRILNKTGKIL

SEQ ID NO: 30582 - protein, 11 aa, synthetic construct
QIARYGQLSEK

SEQ ID NO: 30583 - protein, 11 aa, synthetic construct
SRFAGIVNSAV

SEQ ID NO: 30584 - protein, 11 aa, synthetic construct
RRDNIEDGDSM

SEQ ID NO: 30585 - protein, 11 aa, synthetic construct
QRDCLTCQVKL

SEQ ID NO: 30586 - protein, 11 aa, synthetic construct
TRLATDLDGMR

SEQ ID NO: 30587 - protein, 10 aa, synthetic construct
KRSTITSRDI

SEQ ID NO: 30588 - protein, 9 aa, synthetic construct
GKFYNFNKF

SEQ ID NO: 30589 - protein, 10 aa, synthetic construct
SGRLPLAVHC

SEQ ID NO: 30590 - protein, 10 aa, synthetic construct
MRVMKTMPFF

SEQ ID NO: 30591 - protein, 9 aa, synthetic construct
GRRAGPPAV

SEQ ID NO: 30592 - protein, 10 aa, synthetic construct
SRKLTLLHSK

SEQ ID NO: 30593 - protein, 10 aa, synthetic construct
RHRILNKTGK

SEQ ID NO: 30594 - protein, 9 aa, synthetic construct
RKLVKMILK

SEQ ID NO: 30595 - protein, 9 aa, synthetic construct
IRSVVFPCI

SEQ ID NO: 30596 - protein, 11 aa, synthetic construct
HRKSYTEEKPY

SEQ ID NO: 30597 - protein, 9 aa, synthetic construct
MRVWMLDDY

SEQ ID NO: 30598 - protein, 10 aa, synthetic construct
IARYGQLSEK

SEQ ID NO: 30599 - protein, 11 aa, synthetic construct
KRKKVKMKRGK

SEQ ID NO: 30600 - protein, 11 aa, synthetic construct
ERLLKKLFSAY

SEQ ID NO: 30601 - protein, 9 aa, synthetic construct
HQQGLPPHY

SEQ ID NO: 30602 - protein, 11 aa, synthetic construct
SRIMPGAFRNL

SEQ ID NO: 30603 - protein, 9 aa, synthetic construct
GRLPLAVHC

SEQ ID NO: 30604 - protein, 11 aa, synthetic construct
ERKLVKMILKL

SEQ ID NO: 30605 - protein, 10 aa, synthetic construct
MSRTPHWALF

SEQ ID NO: 30606 - protein, 11 aa, synthetic construct
LRHLEQPHQQL

SEQ ID NO: 30607 - protein, 9 aa, synthetic construct
SRGQAVSSH

SEQ ID NO: 30608 - protein, 9 aa, synthetic construct
GRGGGLGNV

SEQ ID NO: 30609 - protein, 8 aa, synthetic construct
SRIMPGAF

SEQ ID NO: 30610 - protein, 10 aa, synthetic construct
ERKLVKMILK

SEQ ID NO: 30611 - protein, 9 aa, synthetic construct
TQSELPPSF

SEQ ID NO: 30612 - protein, 9 aa, synthetic construct
QRKASNASK

SEQ ID NO: 30613 - protein, 10 aa, synthetic construct
GSRFAGIVNS

SEQ ID NO: 30614 - protein, 11 aa, synthetic construct
KRGKASSSGKR

SEQ ID NO: 30615 - protein, 10 aa, synthetic construct
KRGKASSSGK

SEQ ID NO: 30616 - protein, 10 aa, synthetic construct
SRFAGIVNSA

SEQ ID NO: 30617 - protein, 10 aa, synthetic construct
GRLPLAVHCA

SEQ ID NO: 30618 - protein, 11 aa, synthetic construct
GRLPLAVHCAQ

SEQ ID NO: 30619 - protein, 10 aa, synthetic construct
RRAGPPAVAT

SEQ ID NO: 30620 - protein, 10 aa, synthetic construct
GRGGGLGNVL

SEQ ID NO: 30621 - protein, 9 aa, synthetic construct
SRTPHWALF

SEQ ID NO: 30622 - protein, 8 aa, synthetic construct
SRTPHWAL

SEQ ID NO: 30623 - protein, 10 aa, synthetic construct
RKEFSGTPAR

SEQ ID NO: 30624 - protein, 9 aa, synthetic construct
ARPSTPQRK

SEQ ID NO: 30625 - protein, 9 aa, synthetic construct
RRAGPPAVA

SEQ ID NO: 30626 - protein, 8 aa, synthetic construct
RRAGPPAV

SEQ ID NO: 30627 - protein, 11 aa, synthetic construct
QRVEDRQDLNR

SEQ ID NO: 30628 - protein, 11 aa, synthetic construct
IRKEFSGTPAR

SEQ ID NO: 30629 - protein, 10 aa, synthetic construct
SERKLVKMIL

SEQ ID NO: 30630 - protein, 9 aa, synthetic construct
MRKQESQSV

SEQ ID NO: 30631 - protein, 9 aa, synthetic construct
RKLTLLHSK

SEQ ID NO: 30632 - protein, 9 aa, synthetic construct
HRILNKTGK

SEQ ID NO: 30633 - protein, 11 aa, synthetic construct
IRLALRLESTY

SEQ ID NO: 30634 - protein, 11 aa, synthetic construct
ERKTKRPSLQL

SEQ ID NO: 30635 - protein, 9 aa, synthetic construct
MRVMKTMPF

SEQ ID NO: 30636 - protein, 9 aa, synthetic construct
HRKSYTEEK

SEQ ID NO: 30637 - protein, 9 aa, synthetic construct
SRDIQTAVR

SEQ ID NO: 30638 - protein, 10 aa, synthetic construct
LRLESTYQNR

SEQ ID NO: 30639 - protein, 11 aa, synthetic construct
GRGAFEAAGFH

SEQ ID NO: 30640 - protein, 8 aa, synthetic construct
KRPSLQLF

SEQ ID NO: 30641 - protein, 9 aa, synthetic construct
QRVEDRQDL

SEQ ID NO: 30642 - protein, 9 aa, synthetic construct
SRFAGIVNS

SEQ ID NO: 30643 - protein, 11 aa, synthetic construct
YMSRTPHWALF

SEQ ID NO: 30644 - protein, 9 aa, synthetic construct
QRQELALSI

SEQ ID NO: 30645 - protein, 10 aa, synthetic construct
TRLATDLDGM

SEQ ID NO: 30646 - protein, 11 aa, synthetic construct
KRSIEEAVPAL

SEQ ID NO: 30647 - protein, 11 aa, synthetic construct
MRVMKTMPFFL

SEQ ID NO: 30648 - protein, 10 aa, synthetic construct
IEKNELSRIM

SEQ ID NO: 30649 - protein, 9 aa, synthetic construct
KENNIRSVV

SEQ ID NO: 30650 - protein, 8 aa, synthetic construct
YESDVVEW

SEQ ID NO: 30651 - protein, 10 aa, synthetic construct
QSELEHLTEL

SEQ ID NO: 30652 - protein, 9 aa, synthetic construct
SEEDIVHSG

SEQ ID NO: 30653 - protein, 10 aa, synthetic construct
VFEYDLISQY

SEQ ID NO: 30654 - protein, 10 aa, synthetic construct
EDIVHSGLAY

SEQ ID NO: 30655 - protein, 10 aa, synthetic construct
QCECLFHGNY

SEQ ID NO: 30656 - protein, 9 aa, synthetic construct
EHDAIPIRW

SEQ ID NO: 30657 - protein, 10 aa, synthetic construct
FEYDLISQYM

SEQ ID NO: 30658 - protein, 9 aa, synthetic construct
KEPNKPPVF

SEQ ID NO: 30659 - protein, 11 aa, synthetic construct
LELSQQQEGQL

SEQ ID NO: 30660 - protein, 10 aa, synthetic construct
KDYMSRTPHW

SEQ ID NO: 30661 - protein, 10 aa, synthetic construct
QSELPPSFAV

SEQ ID NO: 30662 - protein, 11 aa, synthetic construct
FSEIVLSAPEW

SEQ ID NO: 30663 - protein, 8 aa, synthetic construct
VENYLIQI

SEQ ID NO: 30664 - protein, 9 aa, synthetic construct
QEDILDTGY

SEQ ID NO: 30665 - protein, 8 aa, synthetic construct
HDAIPIRW

SEQ ID NO: 30666 - protein, 10 aa, synthetic construct
TEYEVAQSPA

SEQ ID NO: 30667 - protein, 9 aa, synthetic construct
EETRLATDL

SEQ ID NO: 30668 - protein, 10 aa, synthetic construct
SKFTVDKSRW

SEQ ID NO: 30669 - protein, 9 aa, synthetic construct
RDIQTAVRL

SEQ ID NO: 30670 - protein, 11 aa, synthetic construct
YEVAQSPAKAL

SEQ ID NO: 30671 - protein, 10 aa, synthetic construct
IKEPNKPPVF

SEQ ID NO: 30672 - protein, 11 aa, synthetic construct
EEDIVHSGLAY

SEQ ID NO: 30673 - protein, 9 aa, synthetic construct
AEVECQRQE

SEQ ID NO: 30674 - protein, 10 aa, synthetic construct
TESSSRGQAV

SEQ ID NO: 30675 - protein, 9 aa, synthetic construct
YNSNSPYEW

SEQ ID NO: 30676 - protein, 11 aa, synthetic construct
LEDGQKNIRLL

SEQ ID NO: 30677 - protein, 10 aa, synthetic construct
LEDGQKNIRL

SEQ ID NO: 30678 - protein, 11 aa, synthetic construct
ANEHDAIPIRW

SEQ ID NO: 30679 - protein, 9 aa, synthetic construct
EIVLSAPEW

SEQ ID NO: 30680 - protein, 10 aa, synthetic construct
KENNIRSVVF

SEQ ID NO: 30681 - protein, 11 aa, synthetic construct
NELSRIMPGAF

SEQ ID NO: 30682 - protein, 9 aa, synthetic construct
GEFPPYLKP

SEQ ID NO: 30683 - protein, 9 aa, synthetic construct
FEYDLISQY

SEQ ID NO: 30684 - protein, 11 aa, synthetic construct
RDTLQPGMRVW

SEQ ID NO: 30685 - protein, 11 aa, synthetic construct
SEAYGRMGLAL

SEQ ID NO: 30686 - protein, 11 aa, synthetic construct
VENYLIQIARY

SEQ ID NO: 30687 - protein, 10 aa, synthetic construct
SEIVLSAPEW

SEQ ID NO: 30688 - protein, 11 aa, synthetic construct
SEIVLSAPEWL

SEQ ID NO: 30689 - protein, 10 aa, synthetic construct
MNEHNAYRCF

SEQ ID NO: 30690 - protein, 9 aa, synthetic construct
SEAYGRMGL

SEQ ID NO: 30691 - protein, 11 aa, synthetic construct
ASEEDIVHSGL

SEQ ID NO: 30692 - protein, 11 aa, synthetic construct
AYSEAYGRMGL

SEQ ID NO: 30693 - protein, 9 aa, synthetic construct
EETSSLLRC

SEQ ID NO: 30694 - protein, 11 aa, synthetic construct
NGEVPNVPVTF

SEQ ID NO: 30695 - protein, 10 aa, synthetic construct
NEHDAIPIRW

SEQ ID NO: 30696 - protein, 11 aa, synthetic construct
NEHDAIPIRWM

SEQ ID NO: 30697 - protein, 11 aa, synthetic construct
QVFEYDLISQY

SEQ ID NO: 30698 - protein, 10 aa, synthetic construct
SDYHPCTGTF

SEQ ID NO: 30699 - protein, 10 aa, synthetic construct
GDDKPESPEY

SEQ ID NO: 30700 - protein, 11 aa, synthetic construct
GEVPNVPVTFD

SEQ ID NO: 30701 - protein, 10 aa, synthetic construct
GEVPNVPVTF

SEQ ID NO: 30702 - protein, 10 aa, synthetic construct
SELPPSFAVI

SEQ ID NO: 30703 - protein, 10 aa, synthetic construct
QESQSVEEAL

SEQ ID NO: 30704 - protein, 9 aa, synthetic construct
CECLFHGNY

SEQ ID NO: 30705 - protein, 8 aa, synthetic construct
EYDLISQY

SEQ ID NO: 30706 - protein, 10 aa, synthetic construct
RPEDNIRLAL

SEQ ID NO: 30707 - protein, 10 aa, synthetic construct
QDVDLHTIQF

SEQ ID NO: 30708 - protein, 11 aa, synthetic construct
SEEDIVHSGLA

SEQ ID NO: 30709 - protein, 10 aa, synthetic construct
SEEDIVHSGL

SEQ ID NO: 30710 - protein, 9 aa, synthetic construct
QESQSVEEA

SEQ ID NO: 30711 - protein, 9 aa, synthetic construct
PEDNIRLAL

SEQ ID NO: 30712 - protein, 9 aa, synthetic construct
STHPKGKFY

SEQ ID NO: 30713 - protein, 9 aa, synthetic construct
KELARRDNI

SEQ ID NO: 30714 - protein, 9 aa, synthetic construct
NEHNAYRCF

SEQ ID NO: 30715 - protein, 9 aa, synthetic construct
SERKLVKMI

SEQ ID NO: 30716 - protein, 8 aa, synthetic construct
SERKLVKM

SEQ ID NO: 30717 - protein, 10 aa, synthetic construct
QELTQLKSAV

SEQ ID NO: 30718 - protein, 9 aa, synthetic construct
EEAVPALCK

SEQ ID NO: 30719 - protein, 9 aa, synthetic construct
DDKPESPEY

SEQ ID NO: 30720 - protein, 9 aa, synthetic construct
TLQPGMRVW

SEQ ID NO: 30721 - protein, 9 aa, synthetic construct
EEDIVHSGL

SEQ ID NO: 30722 - protein, 8 aa, synthetic construct
LEQPHQQL

SEQ ID NO: 30723 - protein, 10 aa, synthetic construct
GDTKEALKEF

SEQ ID NO: 30724 - protein, 10 aa, synthetic construct
GEDGDTKEAL

SEQ ID NO: 30725 - protein, 9 aa, synthetic construct
SELPPSFAV

SEQ ID NO: 30726 - protein, 9 aa, synthetic construct
FEKVEQLRI

SEQ ID NO: 30727 - protein, 9 aa, synthetic construct
KLFSAYNKW

SEQ ID NO: 30728 - protein, 9 aa, synthetic construct
YEGNARDLI

SEQ ID NO: 30729 - protein, 9 aa, synthetic construct
DYMSRTPHW

SEQ ID NO: 30730 - protein, 9 aa, synthetic construct
TEYEVAQSP

SEQ ID NO: 30731 - protein, 10 aa, synthetic construct
AEVECQRQEL

SEQ ID NO: 30732 - protein, 9 aa, synthetic construct
QELTQLKSA

SEQ ID NO: 30733 - protein, 10 aa, synthetic construct
WDYESDVVEW

SEQ ID NO: 30734 - protein, 9 aa, synthetic construct
QGLPPHYPL

SEQ ID NO: 30735 - protein, 9 aa, synthetic construct
VAQSPAKAL

SEQ ID NO: 30736 - protein, 11 aa, synthetic construct
IVPDSEQRLKI

SEQ ID NO: 30737 - protein, 10 aa, synthetic construct
IVPDSEQRLK

SEQ ID NO: 30738 - protein, 8 aa, synthetic construct
MPGAFRNL

SEQ ID NO: 30739 - protein, 8 aa, synthetic construct
LPPSFAVI

SEQ ID NO: 30740 - protein, 11 aa, synthetic construct
QSELPPSFAVI

SEQ ID NO: 30741 - protein, 9 aa, synthetic construct
VYEGNARDL

SEQ ID NO: 30742 - protein, 9 aa, synthetic construct
TSRDIQTAV

SEQ ID NO: 30743 - protein, 9 aa, synthetic construct
TVTPDTKAL

SEQ ID NO: 30744 - protein, 10 aa, synthetic construct
TSMDTTKTVL

SEQ ID NO: 30745 - protein, 9 aa, synthetic construct
AFSNSSHLM

SEQ ID NO: 30746 - protein, 10 aa, synthetic construct
VTPDTKALLE

SEQ ID NO: 30747 - protein, 10 aa, synthetic construct
GVPLHSTTPL

SEQ ID NO: 30748 - protein, 9 aa, synthetic construct
EVPNVPVTF

SEQ ID NO: 30749 - protein, 9 aa, synthetic construct
ELPPSFAVI

SEQ ID NO: 30750 - protein, 8 aa, synthetic construct
ELPPSFAV

SEQ ID NO: 30751 - protein, 11 aa, synthetic construct
LKIVPDSEQRL

SEQ ID NO: 30752 - protein, 9 aa, synthetic construct
AVAAVGSHL

SEQ ID NO: 30753 - protein, 9 aa, synthetic construct
ISLPRVKEL

SEQ ID NO: 30754 - protein, 8 aa, synthetic construct
VAAVGSHL

SEQ ID NO: 30755 - protein, 8 aa, synthetic construct
GLPPHYPL

SEQ ID NO: 30756 - protein, 8 aa, synthetic construct
VPDSEQRL

SEQ ID NO: 30757 - protein, 9 aa, synthetic construct
VPLHSTTPL

SEQ ID NO: 30758 - protein, 11 aa, synthetic construct
KIPTAHKHSHV

SEQ ID NO: 30759 - protein, 10 aa, synthetic construct
KIVPDSEQRL

SEQ ID NO: 30760 - protein, 11 aa, synthetic construct
KTVTPDTKALL

SEQ ID NO: 30761 - protein, 10 aa, synthetic construct
YVPMAVGSRF

SEQ ID NO: 30762 - protein, 8 aa, synthetic construct
VVHKPSAM

SEQ ID NO: 30763 - protein, 9 aa, synthetic construct
LGFEKVEQL

SEQ ID NO: 30764 - protein, 9 aa, synthetic construct
TSMDTTKTV

SEQ ID NO: 30765 - protein, 8 aa, synthetic construct
FSNSSHLM

SEQ ID NO: 30766 - protein, 8 aa, synthetic construct
SLPRVKEL

SEQ ID NO: 30767 - protein, 10 aa, synthetic construct
TSPPPCCNSV

SEQ ID NO: 30768 - protein, 10 aa, synthetic construct
LQPGMRVWML

SEQ ID NO: 30769 - protein, 11 aa, synthetic construct
VIKEPNKPPVF

SEQ ID NO: 30770 - protein, 9 aa, synthetic construct
AAVGSHLYI

SEQ ID NO: 30771 - protein, 9 aa, synthetic construct
CAAKNASLL

SEQ ID NO: 30772 - protein, 11 aa, synthetic construct
WLPTTPAAPGL

SEQ ID NO: 30773 - protein, 9 aa, synthetic construct
ILNKTGKIL

SEQ ID NO: 30774 - protein, 9 aa, synthetic construct
GAASEPEVL

SEQ ID NO: 30775 - protein, 9 aa, synthetic construct
TMPPPPVSG

SEQ ID NO: 30776 - protein, 8 aa, synthetic construct
TMPPPPVS

SEQ ID NO: 30777 - protein, 9 aa, synthetic construct
SPPPCCNSV

SEQ ID NO: 30778 - protein, 10 aa, synthetic construct
FISLPRVKEL

SEQ ID NO: 30779 - protein, 9 aa, synthetic construct
FVVHKPSAM

SEQ ID NO: 30780 - protein, 8 aa, synthetic construct
AASEPEVL

SEQ ID NO: 30781 - protein, 9 aa, synthetic construct
TSNARAVIM

SEQ ID NO: 30782 - protein, 9 aa, synthetic construct
NVPVTFDDV

SEQ ID NO: 30783 - protein, 10 aa, synthetic construct
TVTPDTKALL

SEQ ID NO: 30784 - protein, 9 aa, synthetic construct
SAPEWLPTT

SEQ ID NO: 30785 - protein, 11 aa, synthetic construct
FQPDTDNRANF

SEQ ID NO: 30786 - protein, 9 aa, synthetic construct
MSRTPHWAL

SEQ ID NO: 30787 - protein, 10 aa, synthetic construct
ISLPRVKELL

SEQ ID NO: 30788 - protein, 9 aa, synthetic construct
ACAAKNASL

SEQ ID NO: 30789 - protein, 8 aa, synthetic construct
VIPVFNLL

SEQ ID NO: 30790 - protein, 9 aa, synthetic construct
KTKRPSLQL

SEQ ID NO: 30791 - protein, 10 aa, synthetic construct
LPPHYPLSQL

SEQ ID NO: 30792 - protein, 9 aa, synthetic construct
VFPCISTGI

SEQ ID NO: 30793 - protein, 8 aa, synthetic construct
VTPDTKAL

SEQ ID NO: 30794 - protein, 9 aa, synthetic construct
VTPDTKALL

SEQ ID NO: 30795 - protein, 9 aa, synthetic construct
LQPGMRVWM

SEQ ID NO: 30796 - protein, 10 aa, synthetic construct
RHLEQPHQQL

SEQ ID NO: 30797 - protein, 9 aa, synthetic construct
MSERQGAGV

SEQ ID NO: 30798 - protein, 8 aa, synthetic construct
LDEETSSL

SEQ ID NO: 30799 - protein, 8 aa, synthetic construct
SMDTTKTV

SEQ ID NO: 30800 - protein, 8 aa, synthetic construct
KGEFPPYL

SEQ ID NO: 30801 - protein, 9 aa, synthetic construct
ATDLDGMRI

SEQ ID NO: 30802 - protein, 9 aa, synthetic construct
LDDDSERKL

SEQ ID NO: 30803 - protein, 10 aa, synthetic construct
RSIEEAVPAL

SEQ ID NO: 30804 - protein, 9 aa, synthetic construct
DVDLHTIQF

SEQ ID NO: 30805 - protein, 11 aa, synthetic construct
YSDYHPCTGTF

SEQ ID NO: 30806 - protein, 8 aa, synthetic construct
YDLISQYM

SEQ ID NO: 30807 - protein, 10 aa, synthetic construct
VPDSEQRLKI

SEQ ID NO: 30808 - protein, 9 aa, synthetic construct
MADWGFCFA

SEQ ID NO: 30809 - protein, 11 aa, synthetic construct
QTSMDTTKTVL

SEQ ID NO: 30810 - protein, 9 aa, synthetic construct
YWDYESDVV

SEQ ID NO: 30811 - protein, 8 aa, synthetic construct
YSEAYGRM

SEQ ID NO: 30812 - protein, 11 aa, synthetic construct
PPALDEETSSL

SEQ ID NO: 30813 - protein, 9 aa, synthetic construct
EYDLISQYM

SEQ ID NO: 30814 - protein, 9 aa, synthetic construct
VAAVGSHLY

SEQ ID NO: 30815 - protein, 8 aa, synthetic construct
QSELPPSF

SEQ ID NO: 30816 - protein, 9 aa, synthetic construct
NIEDGDSMI

SEQ ID NO: 30817 - protein, 8 aa, synthetic construct
VDLHTIQF

SEQ ID NO: 30818 - protein, 10 aa, synthetic construct
LSDSNMFISL

SEQ ID NO: 30819 - protein, 9 aa, synthetic construct
CIDPAYSEA

SEQ ID NO: 30820 - protein, 11 aa, synthetic construct
NADAGIDGVIL

SEQ ID NO: 30821 - protein, 9 aa, synthetic construct
LGDRWFQRV

SEQ ID NO: 30822 - protein, 11 aa, synthetic construct
GQDVDLHTIQF

SEQ ID NO: 30823 - protein, 9 aa, synthetic construct
NADAGIDGV

SEQ ID NO: 30824 - protein, 10 aa, synthetic construct
LATDLDGMRI

SEQ ID NO: 30825 - protein, 8 aa, synthetic construct
MADWGFCF

SEQ ID NO: 30826 - protein, 10 aa, synthetic construct
PALDEETSSL

SEQ ID NO: 30827 - protein, 15 aa, synthetic construct
TIVRKKALPDSGEDG

SEQ ID NO: 30828 - protein, 15 aa, synthetic construct
SELEHLTELRREAGK

SEQ ID NO: 30829 - protein, 15 aa, synthetic construct
TGTFSYQSTFSVHQK

SEQ ID NO: 30830 - protein, 15 aa, synthetic construct
LLFNMLRHLEQPHQQ

SEQ ID NO: 30831 - protein, 15 aa, synthetic construct
KAVENYLIQIARYGQ

SEQ ID NO: 30832 - protein, 15 aa, synthetic construct
TSSIVIKEPNKPPVF

SEQ ID NO: 30833 - protein, 15 aa, synthetic construct
MYRGPVYALHDVTDK

SEQ ID NO: 30834 - protein, 15 aa, synthetic construct
NGFMRKQESQSVEEA

SEQ ID NO: 30835 - protein, 15 aa, synthetic construct
KLQEIYQELTQLKSA

SEQ ID NO: 30836 - protein, 15 aa, synthetic construct
GSFFLYSKFTVDKSR

SEQ ID NO: 30837 - protein, 15 aa, synthetic construct
TIDVDKKLEDGQKNI

SEQ ID NO: 30838 - protein, 15 aa, synthetic construct
AEFQWFKEETRLATD

SEQ ID NO: 30839 - protein, 15 aa, synthetic construct
LAHYNKRSTITSRDI

SEQ ID NO: 30840 - protein, 15 aa, synthetic construct
SADYYKANEHDAIPI

SEQ ID NO: 30841 - protein, 15 aa, synthetic construct
QEIYQELTQLKSAVG

SEQ ID NO: 30842 - protein, 15 aa, synthetic construct
LGDRWFQRVEDRQDL

SEQ ID NO: 30843 - protein, 15 aa, synthetic construct
EHNAYRCFSQPRHIS

SEQ ID NO: 30844 - protein, 15 aa, synthetic construct
YSADYYKANEHDAIP

SEQ ID NO: 30845 - protein, 15 aa, synthetic construct
GSFGMVYEGNARDLI

SEQ ID NO: 30846 - protein, 15 aa, synthetic construct
PPSFAVITEDATLSP

SEQ ID NO: 30847 - protein, 15 aa, synthetic construct
SAKPFTIDVDKKLED

SEQ ID NO: 30848 - protein, 15 aa, synthetic construct
PKGKFYNFNKFGENK

SEQ ID NO: 30849 - protein, 15 aa, synthetic construct
LEHLTELRREAGKDR

SEQ ID NO: 30850 - protein, 15 aa, synthetic construct
KNAYVPMAVGSRFAG

SEQ ID NO: 30851 - protein, 15 aa, synthetic construct
FQWFKEETRLATDLD

SEQ ID NO: 30852 - protein, 15 aa, synthetic construct
CGCGWKGNGKLPGTS

SEQ ID NO: 30853 - protein, 15 aa, synthetic construct
NNVFVVHKPSAMPSR

SEQ ID NO: 30854 - protein, 15 aa, synthetic construct
EDNIRLALRLESTYQ

SEQ ID NO: 30855 - protein, 15 aa, synthetic construct
VENYLIQIARYGQLS

SEQ ID NO: 30856 - protein, 15 aa, synthetic construct
SKFTVDKSRWQQGNV

SEQ ID NO: 30857 - protein, 15 aa, synthetic construct
TAEFQDRISGASEED

SEQ ID NO: 30858 - protein, 15 aa, synthetic construct
FTIDVDKKLEDGQKN

SEQ ID NO: 30859 - protein, 15 aa, synthetic construct
GKAFSNSSHLMGHGR

SEQ ID NO: 30860 - protein, 15 aa, synthetic construct
PEDNIRLALRLESTY

SEQ ID NO: 30861 - protein, 15 aa, synthetic construct
AKPFTIDVDKKLEDG

SEQ ID NO: 30862 - protein, 15 aa, synthetic construct
GCGWKGNGKLPGTSR

SEQ ID NO: 30863 - protein, 15 aa, synthetic construct
DNGFMRKQESQSVEE

SEQ ID NO: 30864 - protein, 15 aa, synthetic construct
NYLIQIARYGQLSEK

SEQ ID NO: 30865 - protein, 15 aa, synthetic construct
GDRWFQRVEDRQDLN

SEQ ID NO: 30866 - protein, 15 aa, synthetic construct
YSKFTVDKSRWQQGN

SEQ ID NO: 30867 - protein, 15 aa, synthetic construct
SDGSFFLYSKFTVDK

SEQ ID NO: 30868 - protein, 15 aa, synthetic construct
LYSKFTVDKSRWQQG

SEQ ID NO: 30869 - protein, 15 aa, synthetic construct
GMVYEGNARDLIKGE

SEQ ID NO: 30870 - protein, 15 aa, synthetic construct
DTGYDKNGKEEVIKR

SEQ ID NO: 30871 - protein, 15 aa, synthetic construct
FGMVYEGNARDLIKG

SEQ ID NO: 30872 - protein, 15 aa, synthetic construct
PFTIDVDKKLEDGQK

SEQ ID NO: 30873 - protein, 15 aa, synthetic construct
DSNMFISLPRVKELL

SEQ ID NO: 30874 - protein, 15 aa, synthetic construct
KTFNWSSTLTNHRKS

SEQ ID NO: 30875 - protein, 15 aa, synthetic construct
DGSFFLYSKFTVDKS

SEQ ID NO: 30876 - protein, 15 aa, synthetic construct
LALLFNMLRHLEQPH

SEQ ID NO: 30877 - protein, 15 aa, synthetic construct
KKKELARRDNIEDGD

SEQ ID NO: 30878 - protein, 15 aa, synthetic construct
RLAHYNKRSTITSRD

SEQ ID NO: 30879 - protein, 15 aa, synthetic construct
GLGDRWFQRVEDRQD

SEQ ID NO: 30880 - protein, 15 aa, synthetic construct
SCGCGWKGNGKLPGT

SEQ ID NO: 30881 - protein, 15 aa, synthetic construct
HIDNGFMRKQESQSV

SEQ ID NO: 30882 - protein, 15 aa, synthetic construct
KDRQLIGRVEASNAD

SEQ ID NO: 30883 - protein, 15 aa, synthetic construct
THPKGKFYNFNKFGE

SEQ ID NO: 30884 - protein, 15 aa, synthetic construct
LSDSNMFISLPRVKE

SEQ ID NO: 30885 - protein, 15 aa, synthetic construct
QWFKEETRLATDLDG

SEQ ID NO: 30886 - protein, 15 aa, synthetic construct
LPPSFAVITEDATLS

SEQ ID NO: 30887 - protein, 15 aa, synthetic construct
SAKDYMSRTPHWALF

SEQ ID NO: 30888 - protein, 15 aa, synthetic construct
GNNVFVVHKPSAMPS

SEQ ID NO: 30889 - protein, 15 aa, synthetic construct
DGQKNIRLLRTELQK

SEQ ID NO: 30890 - protein, 15 aa, synthetic construct
KGKFYNFNKFGENKY

SEQ ID NO: 30891 - protein, 15 aa, synthetic construct
LFNMLRHLEQPHQQL

SEQ ID NO: 30892 - protein, 15 aa, synthetic construct
DLDGMRIENKGRMST

SEQ ID NO: 30893 - protein, 15 aa, synthetic construct
GKFYNFNKFGENKYD

SEQ ID NO: 30894 - protein, 15 aa, synthetic construct
KPFTIDVDKKLEDGQ

SEQ ID NO: 30895 - protein, 15 aa, synthetic construct
CTSSIVIKEPNKPPV

SEQ ID NO: 30896 - protein, 15 aa, synthetic construct
DRQLIGRVEASNADA

SEQ ID NO: 30897 - protein, 15 aa, synthetic construct
FSAYNKWSRPVANIS

SEQ ID NO: 30898 - protein, 15 aa, synthetic construct
SRDIQTAVRLLLPGE

SEQ ID NO: 30899 - protein, 15 aa, synthetic construct
GRGAFEAAGFHLNEH

SEQ ID NO: 30900 - protein, 15 aa, synthetic construct
SAYNKWSRPVANISD

SEQ ID NO: 30901 - protein, 15 aa, synthetic construct
KLVKMILKLLEDKNG

SEQ ID NO: 30902 - protein, 15 aa, synthetic construct
ELEHLTELRREAGKD

SEQ ID NO: 30903 - protein, 15 aa, synthetic construct
AVENYLIQIARYGQL

SEQ ID NO: 30904 - protein, 15 aa, synthetic construct
KKELARRDNIEDGDS

SEQ ID NO: 30905 - protein, 15 aa, synthetic construct
NVFVVHKPSAMPSRE

SEQ ID NO: 30906 - protein, 15 aa, synthetic construct
ALLFNMLRHLEQPHQ

SEQ ID NO: 30907 - protein, 15 aa, synthetic construct
ENYLIQIARYGQLSE

SEQ ID NO: 30908 - protein, 15 aa, synthetic construct
SFGMVYEGNARDLIK

SEQ ID NO: 30909 - protein, 15 aa, synthetic construct
DRWFQRVEDRQDLNR

SEQ ID NO: 30910 - protein, 15 aa, synthetic construct
LFSAYNKWSRPVANI

SEQ ID NO: 30911 - protein, 15 aa, synthetic construct
KLFSAYNKWSRPVAN

SEQ ID NO: 30912 - protein, 15 aa, synthetic construct
RWFQRVEDRQDLNRQ

SEQ ID NO: 30913 - protein, 15 aa, synthetic construct
AHYNKRSTITSRDIQ

SEQ ID NO: 30914 - protein, 15 aa, synthetic construct
KFYNFNKFGENKYDK

SEQ ID NO: 30915 - protein, 15 aa, synthetic construct
EFQWFKEETRLATDL

SEQ ID NO: 30916 - protein, 15 aa, synthetic construct
QVMQAKKKELARRDN

SEQ ID NO: 30917 - protein, 15 aa, synthetic construct
SKGNNVFVVHKPSAM

SEQ ID NO: 30918 - protein, 15 aa, synthetic construct
QGSFGMVYEGNARDL

SEQ ID NO: 30919 - protein, 15 aa, synthetic construct
MPGAFRNLGSLRYLS

SEQ ID NO: 30920 - protein, 15 aa, synthetic construct
LLVKDIYFLHKIHTN

SEQ ID NO: 30921 - protein, 15 aa, synthetic construct
RPEDNIRLALRLEST

SEQ ID NO: 30922 - protein, 15 aa, synthetic construct
KGNNVFVVHKPSAMP

SEQ ID NO: 30923 - protein, 15 aa, synthetic construct
MFISLPRVKELLEDD

SEQ ID NO: 30924 - protein, 15 aa, synthetic construct
YRGPVYALHDVTDKI

SEQ ID NO: 30925 - protein, 15 aa, synthetic construct
AKKKELARRDNIEDG

SEQ ID NO: 30926 - protein, 15 aa, synthetic construct
DKTVTPDTKALLERA

SEQ ID NO: 30927 - protein, 15 aa, synthetic construct
GSRFAGIVNSAVQTT

SEQ ID NO: 30928 - protein, 15 aa, synthetic construct
PTAEFQDRISGASEE

SEQ ID NO: 30929 - protein, 15 aa, synthetic construct
HPKGKFYNFNKFGEN

SEQ ID NO: 30930 - protein, 15 aa, synthetic construct
AEFQDRISGASEEDI

SEQ ID NO: 30931 - protein, 15 aa, synthetic construct
AKDYMSRTPHWALFG

SEQ ID NO: 30932 - protein, 15 aa, synthetic construct
ADYYKANEHDAIPIR

SEQ ID NO: 30933 - protein, 15 aa, synthetic construct
FLYSKFTVDKSRWQQ

SEQ ID NO: 30934 - protein, 15 aa, synthetic construct
MKTMPFFLEGKPKAT

SEQ ID NO: 30935 - protein, 15 aa, synthetic construct
DNIRLALRLESTYQN

SEQ ID NO: 30936 - protein, 15 aa, synthetic construct
IDNGFMRKQESQSVE

SEQ ID NO: 30937 - protein, 15 aa, synthetic construct
RKLVKMILKLLEDKN

SEQ ID NO: 30938 - protein, 15 aa, synthetic construct
EHLTELRREAGKDRS

SEQ ID NO: 30939 - protein, 15 aa, synthetic construct
SDSNMFISLPRVKEL

SEQ ID NO: 30940 - protein, 15 aa, synthetic construct
SNMFISLPRVKELLE

SEQ ID NO: 30941 - protein, 15 aa, synthetic construct
ERKLVKMILKLLEDK

SEQ ID NO: 30942 - protein, 15 aa, synthetic construct
ELALSIENKRKVLGK

SEQ ID NO: 30943 - protein, 15 aa, synthetic construct
VGSRFAGIVNSAVQT

SEQ ID NO: 30944 - protein, 15 aa, synthetic construct
CGKAFSNSSHLMGHG

SEQ ID NO: 30945 - protein, 15 aa, synthetic construct
LVKDIYFLHKIHTNH

SEQ ID NO: 30946 - protein, 15 aa, synthetic construct
SERKLVKMILKLLED

SEQ ID NO: 30947 - protein, 15 aa, synthetic construct
SKNAYVPMAVGSRFA

SEQ ID NO: 30948 - protein, 15 aa, synthetic construct
NMFISLPRVKELLED

SEQ ID NO: 30949 - protein, 15 aa, synthetic construct
VEQLRILEQSGEWWK

SEQ ID NO: 30950 - protein, 15 aa, synthetic construct
GTFSYQSTFSVHQKV

SEQ ID NO: 30951 - protein, 15 aa, synthetic construct
LCTSSIVIKEPNKPP

SEQ ID NO: 30952 - protein, 15 aa, synthetic construct
RGPVYALHDVTDKIP

SEQ ID NO: 30953 - protein, 15 aa, synthetic construct
KKLFSAYNKWSRPVA

SEQ ID NO: 30954 - protein, 15 aa, synthetic construct
KELARRDNIEDGDSM

SEQ ID NO: 30955 - protein, 15 aa, synthetic construct
SFFLYSKFTVDKSRW

SEQ ID NO: 30956 - protein, 15 aa, synthetic construct
SDVDLIPMNEHNAYR

SEQ ID NO: 30957 - protein, 15 aa, synthetic construct
LQEIYQELTQLKSAV

SEQ ID NO: 30958 - protein, 15 aa, synthetic construct
LDDVNEIIRKEFSGT

SEQ ID NO: 30959 - protein, 15 aa, synthetic construct
PLHSTTPLPRRPQPR

SEQ ID NO: 30960 - protein, 15 aa, synthetic construct
YQELTQLKSAVGELP

SEQ ID NO: 30961 - protein, 15 aa, synthetic construct
LVKMILKLLEDKNGE

SEQ ID NO: 30962 - protein, 15 aa, synthetic construct
REALLKIVPDSEQRL

SEQ ID NO: 30963 - protein, 15 aa, synthetic construct
DDVNEIIRKEFSGTP

SEQ ID NO: 30964 - protein, 15 aa, synthetic construct
PLAVHCAQHGPGSGA

SEQ ID NO: 30965 - protein, 15 aa, synthetic construct
DVDLIPMNEHNAYRC

SEQ ID NO: 30966 - protein, 15 aa, synthetic construct
TDLDGMRIENKGRMS

SEQ ID NO: 30967 - protein, 15 aa, synthetic construct
RKKVKMKRGKASSSG

SEQ ID NO: 30968 - protein, 15 aa, synthetic construct
KDLLLAALQGLKGSS

SEQ ID NO: 30969 - protein, 15 aa, synthetic construct
LLKKLFSAYNKWSRP

SEQ ID NO: 30970 - protein, 15 aa, synthetic construct
GFEKVEQLRILEQSG

SEQ ID NO: 30971 - protein, 15 aa, synthetic construct
EKVEQLRILEQSGEW

SEQ ID NO: 30972 - protein, 15 aa, synthetic construct
NAYVPMAVGSRFAGI

SEQ ID NO: 30973 - protein, 15 aa, synthetic construct
SKRKKVKMKRGKASS

SEQ ID NO: 30974 - protein, 15 aa, synthetic construct
QSELEHLTELRREAG

SEQ ID NO: 30975 - protein, 15 aa, synthetic construct
LIALRIEKNELSRIM

SEQ ID NO: 30976 - protein, 15 aa, synthetic construct
EIYQELTQLKSAVGE

SEQ ID NO: 30977 - protein, 15 aa, synthetic construct
FLISLTQKIPTAHKH

SEQ ID NO: 30978 - protein, 15 aa, synthetic construct
FNMLRHLEQPHQQLS

SEQ ID NO: 30979 - protein, 15 aa, synthetic construct
VMQAKKKELARRDNI

SEQ ID NO: 30980 - protein, 15 aa, synthetic construct
SSLKLVKENNIRSVV

SEQ ID NO: 30981 - protein, 15 aa, synthetic construct
LHSTTPLPRRPQPRQ

SEQ ID NO: 30982 - protein, 15 aa, synthetic construct
AYVPMAVGSRFAGIV

SEQ ID NO: 30983 - protein, 15 aa, synthetic construct
GVPLHSTTPLPRRPQ

SEQ ID NO: 30984 - protein, 15 aa, synthetic construct
LDKTVTPDTKALLER

SEQ ID NO: 30985 - protein, 15 aa, synthetic construct
ESKMACAAKNASLLK

SEQ ID NO: 30986 - protein, 15 aa, synthetic construct
IALRIEKNELSRIMP

SEQ ID NO: 30987 - protein, 15 aa, synthetic construct
NLLVKDIYFLHKIHT

SEQ ID NO: 30988 - protein, 15 aa, synthetic construct
KRKKVKMKRGKASSS

SEQ ID NO: 30989 - protein, 15 aa, synthetic construct
KTVTPDTKALLERAK

SEQ ID NO: 30990 - protein, 15 aa, synthetic construct
YVPMAVGSRFAGIVN

SEQ ID NO: 30991 - protein, 15 aa, synthetic construct
LRPEDNIRLALRLES

SEQ ID NO: 30992 - protein, 15 aa, synthetic construct
DLLLAALQGLKGSSE

SEQ ID NO: 30993 - protein, 15 aa, synthetic construct
VSVAQVVAEMWRRNG

SEQ ID NO: 30994 - protein, 15 aa, synthetic construct
LKKLFSAYNKWSRPV

SEQ ID NO: 30995 - protein, 15 aa, synthetic construct
SHLMGHGRIHSGEKP

SEQ ID NO: 30996 - protein, 15 aa, synthetic construct
SSHLMGHGRIHSGEK

SEQ ID NO: 30997 - protein, 15 aa, synthetic construct
LGVPLHSTTPLPRRP

SEQ ID NO: 30998 - protein, 15 aa, synthetic construct
QESQSVEEALKKLGI

SEQ ID NO: 30999 - protein, 15 aa, synthetic construct
SSTLTNHRKSYTEEK

SEQ ID NO: 31000 - protein, 15 aa, synthetic construct
SNSSHLMGHGRIHSG

SEQ ID NO: 31001 - protein, 15 aa, synthetic construct
RQELALSIENKRKVL

SEQ ID NO: 31002 - protein, 15 aa, synthetic construct
FEKVEQLRILEQSGE

SEQ ID NO: 31003 - protein, 15 aa, synthetic construct
EALLKIVPDSEQRLK

SEQ ID NO: 31004 - protein, 15 aa, synthetic construct
VQSELEHLTELRREA

SEQ ID NO: 31005 - protein, 15 aa, synthetic construct
QELALSIENKRKVLG

SEQ ID NO: 31006 - protein, 15 aa, synthetic construct
KNASLLKINNKNALE

SEQ ID NO: 31007 - protein, 15 aa, synthetic construct
QELTQLKSAVGELPE

SEQ ID NO: 31008 - protein, 15 aa, synthetic construct
ITSRDIQTAVRLLLP

SEQ ID NO: 31009 - protein, 15 aa, synthetic construct
RDIQTAVRLLLPGEL

SEQ ID NO: 31010 - protein, 15 aa, synthetic construct
FSDVDLIPMNEHNAY

SEQ ID NO: 31011 - protein, 15 aa, synthetic construct
LPLAVHCAQHGPGSG

SEQ ID NO: 31012 - protein, 15 aa, synthetic construct
HLTELRREAGKDRSS

SEQ ID NO: 31013 - protein, 15 aa, synthetic construct
EDGQKNIRLLRTELQ

SEQ ID NO: 31014 - protein, 15 aa, synthetic construct
SLKLVKENNIRSVVF

SEQ ID NO: 31015 - protein, 15 aa, synthetic construct
YLIQIARYGQLSEKV

SEQ ID NO: 31016 - protein, 15 aa, synthetic construct
QESKMACAAKNASLL

SEQ ID NO: 31017 - protein, 15 aa, synthetic construct
IKLNELWKNFGFKKH

SEQ ID NO: 31018 - protein, 15 aa, synthetic construct
TSRDIQTAVRLLLPG

SEQ ID NO: 31019 - protein, 15 aa, synthetic construct
NIRLALRLESTYQNR

SEQ ID NO: 31020 - protein, 15 aa, synthetic construct
IYQELTQLKSAVGEL

SEQ ID NO: 31021 - protein, 15 aa, synthetic construct
ALDKTVTPDTKALLE

SEQ ID NO: 31022 - protein, 15 aa, synthetic construct
SVAQVVAEMWRRNGL

SEQ ID NO: 31023 - protein, 15 aa, synthetic construct
NSSHLMGHGRIHSGE

SEQ ID NO: 31024 - protein, 15 aa, synthetic construct
HLYISGGFGGVALGR

SEQ ID NO: 31025 - protein, 15 aa, synthetic construct
ARRDNIEDGDSMISS

SEQ ID NO: 31026 - protein, 15 aa, synthetic construct
QDRISGASEEDIVHS

SEQ ID NO: 31027 - protein, 15 aa, synthetic construct
SRFAGIVNSAVQTTF

SEQ ID NO: 31028 - protein, 15 aa, synthetic construct
LISQYMQGYPSKVHI

SEQ ID NO: 31029 - protein, 15 aa, synthetic construct
PRGLASGRLPLAVHC

SEQ ID NO: 31030 - protein, 15 aa, synthetic construct
PSKCQSAAASQLDKP

SEQ ID NO: 31031 - protein, 15 aa, synthetic construct
DLISQYMQGYPSKVH

SEQ ID NO: 31032 - protein, 15 aa, synthetic construct
RNKFYSFALDKTVTP

SEQ ID NO: 31033 - protein, 15 aa, synthetic construct
VKLAKGTVQTSMDTT

SEQ ID NO: 31034 - protein, 15 aa, synthetic construct
IGRVEASNADAGIDG

SEQ ID NO: 31035 - protein, 15 aa, synthetic construct
MEESVAHAVAAVGSH

SEQ ID NO: 31036 - protein, 15 aa, synthetic construct
AAGEGEARPSTPQRK

SEQ ID NO: 31037 - protein, 15 aa, synthetic construct
VKMKRGKASSSGKRQ

SEQ ID NO: 31038 - protein, 15 aa, synthetic construct
TRGLQTGPVPPGRRA

SEQ ID NO: 31039 - protein, 15 aa, synthetic construct
HLMGHGRIHSGEKPY

SEQ ID NO: 31040 - protein, 15 aa, synthetic construct
IIRKEFSGTPARNQT

SEQ ID NO: 31041 - protein, 15 aa, synthetic construct
LINDALHQSGQIERG

SEQ ID NO: 31042 - protein, 15 aa, synthetic construct
ALHQSGQIERGCEGP

SEQ ID NO: 31043 - protein, 15 aa, synthetic construct
PREYWDYESDVVEWG

SEQ ID NO: 31044 - protein, 15 aa, synthetic construct
AVKLAKGTVQTSMDT

SEQ ID NO: 31045 - protein, 15 aa, synthetic construct
TSLPVTDASSVPTGH

SEQ ID NO: 31046 - protein, 15 aa, synthetic construct
QSELPPSFAVITEDA

SEQ ID NO: 31047 - protein, 15 aa, synthetic construct
FMRKQESQSVEEALK

SEQ ID NO: 31048 - protein, 15 aa, synthetic construct
EDIVHSGLAYTMERS

SEQ ID NO: 31049 - protein, 15 aa, synthetic construct
NEIIRKEFSGTPARN

SEQ ID NO: 31050 - protein, 15 aa, synthetic construct
GSSGAASEPEVLGEE

SEQ ID NO: 31051 - protein, 15 aa, synthetic construct
ESSSRGQAVSSHEQA

SEQ ID NO: 31052 - protein, 15 aa, synthetic construct
AVKLAKGTVQTGVDT

SEQ ID NO: 31053 - protein, 15 aa, synthetic construct
KRSIEEAVPALCKTR

SEQ ID NO: 31054 - protein, 15 aa, synthetic construct
GAVKLAKGTVQTSMD

SEQ ID NO: 31055 - protein, 15 aa, synthetic construct
RFAGIVNSAVQTTFV

SEQ ID NO: 31056 - protein, 15 aa, synthetic construct
EIIRKEFSGTPARNQ

SEQ ID NO: 31057 - protein, 15 aa, synthetic construct
TESSSRGQAVSSHEQ

SEQ ID NO: 31058 - protein, 15 aa, synthetic construct
QRKASNASKSNIAAA

SEQ ID NO: 31059 - protein, 15 aa, synthetic construct
LLKIVPDSEQRLKID

SEQ ID NO: 31060 - protein, 15 aa, synthetic construct
TGAVKLAKGTVQTGV

SEQ ID NO: 31061 - protein, 15 aa, synthetic construct
ISQYMQGYPSKVHIL

SEQ ID NO: 31062 - protein, 15 aa, synthetic construct
NKFYSFALDKTVTPD

SEQ ID NO: 31063 - protein, 15 aa, synthetic construct
VMPPSTQAVSFQPDT

SEQ ID NO: 31064 - protein, 15 aa, synthetic construct
EFQDRISGASEEDIV

SEQ ID NO: 31065 - protein, 15 aa, synthetic construct
TGAVKLAKGTVQTSM

SEQ ID NO: 31066 - protein, 15 aa, synthetic construct
HTESSSRGQAVSSHE

SEQ ID NO: 31067 - protein, 15 aa, synthetic construct
DALHQSGQIERGCEG

SEQ ID NO: 31068 - protein, 15 aa, synthetic construct
RKASNASKSNIAAAN

SEQ ID NO: 31069 - protein, 15 aa, synthetic construct
KASNASKSNIAAANS

SEQ ID NO: 31070 - protein, 15 aa, synthetic construct
QWGSSGAASEPEVLG

SEQ ID NO: 31071 - protein, 15 aa, synthetic construct
PPPVSGSRSSPPAPP

SEQ ID NO: 31072 - protein, 15 aa, synthetic construct
EESVAHAVAAVGSHL

SEQ ID NO: 31073 - protein, 15 aa, synthetic construct
SLPVTDASSVPTGHA

SEQ ID NO: 31074 - protein, 15 aa, synthetic construct
GRVEASNADAGIDGV

SEQ ID NO: 31075 - protein, 15 aa, synthetic construct
RHTESSSRGQAVSSH

SEQ ID NO: 31076 - protein, 15 aa, synthetic construct
ASEEDIVHSGLAYTM

SEQ ID NO: 31077 - protein, 15 aa, synthetic construct
FQDRISGASEEDIVH

SEQ ID NO: 31078 - protein, 15 aa, synthetic construct
EVAQSPAKALEGQGA

SEQ ID NO: 31079 - protein, 15 aa, synthetic construct
RKQESQSVEEALKKL

SEQ ID NO: 31080 - protein, 15 aa, synthetic construct
RQLIGRVEASNADAG

SEQ ID NO: 31081 - protein, 15 aa, synthetic construct
TSNARAVIMFANEDD

SEQ ID NO: 31082 - protein, 15 aa, synthetic construct
YWDYESDVVEWGNQD

SEQ ID NO: 31083 - protein, 15 aa, synthetic construct
LIGRVEASNADAGID

SEQ ID NO: 31084 - protein, 15 aa, synthetic construct
KKVKMKRGKASSSGK

SEQ ID NO: 31085 - protein, 15 aa, synthetic construct
NDALHQSGQIERGCE

SEQ ID NO: 31086 - protein, 15 aa, synthetic construct
LETSNARAVIMFANE

SEQ ID NO: 31087 - protein, 15 aa, synthetic construct
CPSKCQSAAASQLDK

SEQ ID NO: 31088 - protein, 15 aa, synthetic construct
YEVAQSPAKALEGQG

SEQ ID NO: 31089 - protein, 15 aa, synthetic construct
DRISGASEEDIVHSG

SEQ ID NO: 31090 - protein, 15 aa, synthetic construct
EEDIVHSGLAYTMER

SEQ ID NO: 31091 - protein, 15 aa, synthetic construct
KANEHDAIPIRWMPP

SEQ ID NO: 31092 - protein, 15 aa, synthetic construct
KVKMKRGKASSSGKR

SEQ ID NO: 31093 - protein, 15 aa, synthetic construct
QLIGRVEASNADAGI

SEQ ID NO: 31094 - protein, 15 aa, synthetic construct
SELPPSFAVITEDAT

SEQ ID NO: 31095 - protein, 15 aa, synthetic construct
SKCQSAAASQLDKPR

SEQ ID NO: 31096 - protein, 15 aa, synthetic construct
AVSFQPDTDNRANFS

SEQ ID NO: 31097 - protein, 15 aa, synthetic construct
RAGPPAVATSAAAAA

SEQ ID NO: 31098 - protein, 15 aa, synthetic construct
PNVPVTFDDVAVHFS

SEQ ID NO: 31099 - protein, 15 aa, synthetic construct
LVSVAQVVAEMWRRN

SEQ ID NO: 31100 - protein, 15 aa, synthetic construct
ETSNARAVIMFANED

SEQ ID NO: 31101 - protein, 15 aa, synthetic construct
SVAHAVAAVGSHLYI

SEQ ID NO: 31102 - protein, 15 aa, synthetic construct
RRDNIEDGDSMISSA

SEQ ID NO: 31103 - protein, 15 aa, synthetic construct
SEEDIVHSGLAYTME

SEQ ID NO: 31104 - protein, 15 aa, synthetic construct
QTRGLQTGPVPPGRR

SEQ ID NO: 31105 - protein, 15 aa, synthetic construct
AQWGSSGAASEPEVL

SEQ ID NO: 31106 - protein, 15 aa, synthetic construct
RKRSIEEAVPALCKT

SEQ ID NO: 31107 - protein, 15 aa, synthetic construct
KAQWGSSGAASEPEV

SEQ ID NO: 31108 - protein, 15 aa, synthetic construct
AVGSRFAGIVNSAVQ

SEQ ID NO: 31109 - protein, 15 aa, synthetic construct
PSFAVITEDATLSPE

SEQ ID NO: 31110 - protein, 15 aa, synthetic construct
GAVKLAKGTVQTGVD

SEQ ID NO: 31111 - protein, 15 aa, synthetic construct
RSIEEAVPALCKTRT

SEQ ID NO: 31112 - protein, 15 aa, synthetic construct
WGSSGAASEPEVLGE

SEQ ID NO: 31113 - protein, 15 aa, synthetic construct
KPESPEYSGGNIVRV

SEQ ID NO: 31114 - protein, 15 aa, synthetic construct
DNIEDGDSMISSATS

SEQ ID NO: 31115 - protein, 15 aa, synthetic construct
FPPYLKPGEISNDPI

SEQ ID NO: 31116 - protein, 15 aa, synthetic construct
PPYLKPGEISNDPIT

SEQ ID NO: 31117 - protein, 15 aa, synthetic construct
REYWDYESDVVEWGN

SEQ ID NO: 31118 - protein, 15 aa, synthetic construct
INDALHQSGQIERGC

SEQ ID NO: 31119 - protein, 15 aa, synthetic construct
RRAGPPAVATSAAAA

SEQ ID NO: 31120 - protein, 15 aa, synthetic construct
MPPSTQAVSFQPDTD

SEQ ID NO: 31121 - protein, 15 aa, synthetic construct
LVMPPSTQAVSFQPD

SEQ ID NO: 31122 - protein, 15 aa, synthetic construct
RRKRSIEEAVPALCK

SEQ ID NO: 31123 - protein, 15 aa, synthetic construct
ESVAHAVAAVGSHLY

SEQ ID NO: 31124 - protein, 15 aa, synthetic construct
PPPPVSGSRSSPPAP

SEQ ID NO: 31125 - protein, 15 aa, synthetic construct
TTSLPVTDASSVPTG

SEQ ID NO: 31126 - protein, 15 aa, synthetic construct
RDNIEDGDSMISSAT

SEQ ID NO: 31127 - protein, 15 aa, synthetic construct
ELPPSFAVITEDATL

SEQ ID NO: 31128 - protein, 15 aa, synthetic construct
MRKQESQSVEEALKK

SEQ ID NO: 31129 - protein, 15 aa, synthetic construct
VKLAKGTVQTGVDTT

SEQ ID NO: 31130 - protein, 15 aa, synthetic construct
NVPVTFDDVAVHFSE

SEQ ID NO: 31131 - protein, 15 aa, synthetic construct
EYWDYESDVVEWGNQ

SEQ ID NO: 31132 - protein, 15 aa, synthetic construct
DYESDVVEWGNQDDY

SEQ ID NO: 31133 - protein, 15 aa, synthetic construct
WDYESDVVEWGNQDD

SEQ ID NO: 31134 - protein, 15 aa, synthetic construct
KKAQWGSSGAASEPE

SEQ ID NO: 31135 - protein, 15 aa, synthetic construct
RNIYSADYYKANEHD

SEQ ID NO: 31136 - protein, 15 aa, synthetic construct
KRSTITSRDIQTAVR

SEQ ID NO: 31137 - protein, 15 aa, synthetic construct
PSTQAVSFQPDTDNR

SEQ ID NO: 31138 - protein, 15 aa, synthetic construct
SRNIYSADYYKANEH

SEQ ID NO: 31139 - protein, 15 aa, synthetic construct
QHWELIQEDILDTGY

SEQ ID NO: 31140 - protein, 15 aa, synthetic construct
DVDLHTIQFHAESFL

SEQ ID NO: 31141 - protein, 15 aa, synthetic construct
TQAVSFQPDTDNRAN

SEQ ID NO: 31142 - protein, 15 aa, synthetic construct
LERNKFYSFALDKTV

SEQ ID NO: 31143 - protein, 15 aa, synthetic construct
QAVSFQPDTDNRANF

SEQ ID NO: 31144 - protein, 15 aa, synthetic construct
RPREYWDYESDVVEW

SEQ ID NO: 31145 - protein, 15 aa, synthetic construct
RGAFEAAGFHLNEHL

SEQ ID NO: 31146 - protein, 15 aa, synthetic construct
GQDVDLHTIQFHAES

SEQ ID NO: 31147 - protein, 15 aa, synthetic construct
MGQDVDLHTIQFHAE

SEQ ID NO: 31148 - protein, 15 aa, synthetic construct
FYVQVSGTEYEVAQS

SEQ ID NO: 31149 - protein, 15 aa, synthetic construct
SNARAVIMFANEDDI

SEQ ID NO: 31150 - protein, 15 aa, synthetic construct
GPVYALHDVTDKIPM

SEQ ID NO: 31151 - protein, 15 aa, synthetic construct
IYSADYYKANEHDAI

SEQ ID NO: 31152 - protein, 15 aa, synthetic construct
QDVDLHTIQFHAESF

SEQ ID NO: 31153 - protein, 15 aa, synthetic construct
WMLDDYEEISAGDEG

SEQ ID NO: 31154 - protein, 15 aa, synthetic construct
YVQVSGTEYEVAQSP

SEQ ID NO: 31155 - protein, 15 aa, synthetic construct
STQAVSFQPDTDNRA

SEQ ID NO: 31156 - protein, 15 aa, synthetic construct
PPSTQAVSFQPDTDN

SEQ ID NO: 31157 - protein, 15 aa, synthetic construct
ERNKFYSFALDKTVT

SEQ ID NO: 31158 - protein, 15 aa, synthetic construct
VPNVPVTFDDVAVHF

SEQ ID NO: 31159 - protein, 15 aa, synthetic construct
RAVIMFANEDDIRRV

SEQ ID NO: 31160 - protein, 15 aa, synthetic construct
GGRGAFEAAGFHLNE

SEQ ID NO: 31161 - protein, 15 aa, synthetic construct
HRPREYWDYESDVVE

SEQ ID NO: 31162 - protein, 15 aa, synthetic construct
NIYSADYYKANEHDA

SEQ ID NO: 31163 - protein, 15 aa, synthetic construct
LQGLKGSSEAPGKDS

SEQ ID NO: 31164 - protein, 15 aa, synthetic construct
YDLISQYMQGYPSKV

SEQ ID NO: 31165 - protein, 15 aa, synthetic construct
GSHLYISGGFGGVAL

SEQ ID NO: 31166 - protein, 15 aa, synthetic construct
SIEEAVPALCKTRTV

SEQ ID NO: 31167 - protein, 15 aa, synthetic construct
RVEASNADAGIDGVI

SEQ ID NO: 31168 - protein, 15 aa, synthetic construct
ALQGLKGSSEAPGKD

SEQ ID NO: 31169 - protein, 15 aa, synthetic construct
SQYMQGYPSKVHILP

SEQ ID NO: 31170 - protein, 15 aa, synthetic construct
LTGAVKLAKGTVQTS

SEQ ID NO: 31171 - protein, 15 aa, synthetic construct
IDPAYSEAYGRMGLA

SEQ ID NO: 31172 - protein, 15 aa, synthetic construct
KLAKGTVQTGVDTTK

SEQ ID NO: 31173 - protein, 15 aa, synthetic construct
IRRKRSIEEAVPALC

SEQ ID NO: 31174 - protein, 15 aa, synthetic construct
KLAKGTVQTSMDTTK

SEQ ID NO: 31175 - protein, 15 aa, synthetic construct
SHLYISGGFGGVALG

SEQ ID NO: 31176 - protein, 15 aa, synthetic construct
RGLQTGPVPPGRRAG

SEQ ID NO: 31177 - protein, 15 aa, synthetic construct
KMKRGKASSSGKRQS

SEQ ID NO: 31178 - protein, 15 aa, synthetic construct
NKRSTITSRDIQTAV

SEQ ID NO: 31179 - protein, 15 aa, synthetic construct
TFSAKDYMSRTPHWA

SEQ ID NO: 31180 - protein, 15 aa, synthetic construct
CTGTFSYQSTFSVHQ

SEQ ID NO: 31181 - protein, 15 aa, synthetic construct
SRTPHWALFGASERG

SEQ ID NO: 31182 - protein, 15 aa, synthetic construct
GTEYEVAQSPAKALE

SEQ ID NO: 31183 - protein, 15 aa, synthetic construct
RKSYTEEKPYKCEEY

SEQ ID NO: 31184 - protein, 15 aa, synthetic construct
RGQAVSSHEQARSSA

SEQ ID NO: 31185 - protein, 15 aa, synthetic construct
RSTITSRDIQTAVRL

SEQ ID NO: 31186 - protein, 15 aa, synthetic construct
NKDRQLIGRVEASNA

SEQ ID NO: 31187 - protein, 15 aa, synthetic construct
FFLYSKFTVDKSRWQ

SEQ ID NO: 31188 - protein, 15 aa, synthetic construct
EYEVAQSPAKALEGQ

SEQ ID NO: 31189 - protein, 15 aa, synthetic construct
QRPVHGLGVPLHSTT

SEQ ID NO: 31190 - protein, 15 aa, synthetic construct
GQAVSSHEQARSSAG

SEQ ID NO: 31191 - protein, 15 aa, synthetic construct
RRWWYRCYAYNSNSP

SEQ ID NO: 31192 - protein, 15 aa, synthetic construct
FSAKDYMSRTPHWAL

SEQ ID NO: 31193 - protein, 15 aa, synthetic construct
HRKSYTEEKPYKCEE

SEQ ID NO: 31194 - protein, 15 aa, synthetic construct
PQRPVHGLGVPLHST

SEQ ID NO: 31195 - protein, 15 aa, synthetic construct
KDYMSRTPHWALFGA

SEQ ID NO: 31196 - protein, 15 aa, synthetic construct
TEYEVAQSPAKALEG

SEQ ID NO: 31197 - protein, 15 aa, synthetic construct
AHAVAAVGSHLYISG

SEQ ID NO: 31198 - protein, 9 aa, synthetic construct
VLAALLHET

SEQ ID NO: 31199 - protein, 10 aa, synthetic construct
VLAALLHETR

SEQ ID NO: 31200 - protein, 10 aa, synthetic construct
ASRASEFLPR

SEQ ID NO: 31201 - protein, 10 aa, synthetic construct
SGLDWTGASR

SEQ ID NO: 31202 - protein, 11 aa, synthetic construct
HVLAALLHETR

SEQ ID NO: 31203 - protein, 11 aa, synthetic construct
GASRASEFLPR

SEQ ID NO: 31204 - protein, 9 aa, synthetic construct
SRASEFLPR

SEQ ID NO: 31205 - protein, 9 aa, synthetic construct
YEEKRKKKM

SEQ ID NO: 31206 - protein, 9 aa, synthetic construct
TGASRASEF

SEQ ID NO: 31207 - protein, 9 aa, synthetic construct
SPAHVLAAL

SEQ ID NO: 31208 - protein, 10 aa, synthetic construct
DSPAHVLAAL

SEQ ID NO: 31209 - protein, 10 aa, synthetic construct
RPDSPAHVLA

SEQ ID NO: 31210 - protein, 15 aa, synthetic construct
GLDWTGASRASEFLP

SEQ ID NO: 31211 - protein, 15 aa, synthetic construct
SPYYKYEEKRKKKMK

SEQ ID NO: 31212 - protein, 15 aa, synthetic construct
LDWTGASRASEFLPR

SEQ ID NO: 31213 - protein, 15 aa, synthetic construct
DSGLDWTGASRASEF

SEQ ID NO: 31214 - protein, 15 aa, synthetic construct
RSPYYKYEEKRKKKM

SEQ ID NO: 31215 - protein, 15 aa, synthetic construct
SGLDWTGASRASEFL

SEQ ID NO: 31216 - protein, 15 aa, synthetic construct
PYYKYEEKRKKKMKE

SEQ ID NO: 31217 - protein, 15 aa, synthetic construct
AHVLAALLHETRAGP

SEQ ID NO: 31218 - protein, 15 aa, synthetic construct
VLAALLHETRAGPTA

SEQ ID NO: 31219 - protein, 15 aa, synthetic construct
SPAHVLAALLHETRA

SEQ ID NO: 31220 - protein, 15 aa, synthetic construct
PAHVLAALLHETRAG

SEQ ID NO: 31221 - protein, 15 aa, synthetic construct
DSPAHVLAALLHETR

SEQ ID NO: 31222 - protein, 15 aa, synthetic construct
TAAFAAGKDSGLDWT

SEQ ID NO: 31223 - protein, 15 aa, synthetic construct
KDSGLDWTGASRASE

SEQ ID NO: 31224 - protein, 15 aa, synthetic construct
PDSPAHVLAALLHET

SEQ ID NO: 31225 - protein, 9 aa, synthetic construct
TLICSPTHA

SEQ ID NO: 31226 - protein, 9 aa, synthetic construct
YVFVMPVEV

SEQ ID NO: 31227 - protein, 9 aa, synthetic construct
VLFLDYVML

SEQ ID NO: 31228 - protein, 11 aa, synthetic construct
AVAEDVSWHLL

SEQ ID NO: 31229 - protein, 10 aa, synthetic construct
AVAEDVSWHL

SEQ ID NO: 31230 - protein, 9 aa, synthetic construct
EQFPETSEL

SEQ ID NO: 31231 - protein, 10 aa, synthetic construct
RMLRAFLSEV

SEQ ID NO: 31232 - protein, 9 aa, synthetic construct
FQSPHIRRL

SEQ ID NO: 31233 - protein, 9 aa, synthetic construct
ALGQYMEGL

SEQ ID NO: 31234 - protein, 10 aa, synthetic construct
AEQFPETSEL

SEQ ID NO: 31235 - protein, 11 aa, synthetic construct
FLDYVMLTIHM

SEQ ID NO: 31236 - protein, 9 aa, synthetic construct
IQFLFNPAV

SEQ ID NO: 31237 - protein, 9 aa, synthetic construct
FLFNPAVTF

SEQ ID NO: 31238 - protein, 9 aa, synthetic construct
FLDYVMLTI

SEQ ID NO: 31239 - protein, 9 aa, synthetic construct
RSIGIPWTL

SEQ ID NO: 31240 - protein, 9 aa, synthetic construct
FVKDIPWSA

SEQ ID NO: 31241 - protein, 10 aa, synthetic construct
GLNDDYVFVM

SEQ ID NO: 31242 - protein, 11 aa, synthetic construct
FLFNPAVTFGT

SEQ ID NO: 31243 - protein, 9 aa, synthetic construct
GQYMEGLNV

SEQ ID NO: 31244 - protein, 9 aa, synthetic construct
AAVGIPWTL

SEQ ID NO: 31245 - protein, 11 aa, synthetic construct
ALGQYMEGLNV

SEQ ID NO: 31246 - protein, 10 aa, synthetic construct
FMDPATFTNM

SEQ ID NO: 31247 - protein, 9 aa, synthetic construct
ALQTPSALL

SEQ ID NO: 31248 - protein, 10 aa, synthetic construct
VLFLDYVMLT

SEQ ID NO: 31249 - protein, 11 aa, synthetic construct
FTNMYNRPIHI

SEQ ID NO: 31250 - protein, 10 aa, synthetic construct
KALQTPSALL

SEQ ID NO: 31251 - protein, 11 aa, synthetic construct
SMVPYIVRQCV

SEQ ID NO: 31252 - protein, 10 aa, synthetic construct
ALPSWPGASR

SEQ ID NO: 31253 - protein, 10 aa, synthetic construct
RALATGMRKK

SEQ ID NO: 31254 - protein, 11 aa, synthetic construct
RALPSWPGASR

SEQ ID NO: 31255 - protein, 11 aa, synthetic construct
GTVQTSMDTTK

SEQ ID NO: 31256 - protein, 10 aa, synthetic construct
RALATGMKRK

SEQ ID NO: 31257 - protein, 11 aa, synthetic construct
TMKMGSLERTK

SEQ ID NO: 31258 - protein, 9 aa, synthetic construct
RALATGMRK

SEQ ID NO: 31259 - protein, 9 aa, synthetic construct
KMGSLERTK

SEQ ID NO: 31260 - protein, 9 aa, synthetic construct
LIQRVVREK

SEQ ID NO: 31261 - protein, 9 aa, synthetic construct
RSKVPCIVR

SEQ ID NO: 31262 - protein, 8 aa, synthetic construct
ALATGMRK

SEQ ID NO: 31263 - protein, 9 aa, synthetic construct
ALATGMRKK

SEQ ID NO: 31264 - protein, 9 aa, synthetic construct
ATFTNMYNR

SEQ ID NO: 31265 - protein, 9 aa, synthetic construct
KQDGKARAK

SEQ ID NO: 31266 - protein, 9 aa, synthetic construct
CSSTLTTHK

SEQ ID NO: 31267 - protein, 9 aa, synthetic construct
ALATGMKRK

SEQ ID NO: 31268 - protein, 10 aa, synthetic construct
TVQTSMDTTK

SEQ ID NO: 31269 - protein, 10 aa, synthetic construct
VTFQSPHIRR

SEQ ID NO: 31270 - protein, 10 aa, synthetic construct
RSIGIPWTLH

SEQ ID NO: 31271 - protein, 10 aa, synthetic construct
KCSSTLTTHK

SEQ ID NO: 31272 - protein, 9 aa, synthetic construct
SSCPQLPPR

SEQ ID NO: 31273 - protein, 9 aa, synthetic construct
VTFQSPHIR

SEQ ID NO: 31274 - protein, 11 aa, synthetic construct
GTMGHGLPSQK

SEQ ID NO: 31275 - protein, 9 aa, synthetic construct
SLERTKLRY

SEQ ID NO: 31276 - protein, 10 aa, synthetic construct
GLIQRVVREK

SEQ ID NO: 31277 - protein, 11 aa, synthetic construct
GLIQRVVREKK

SEQ ID NO: 31278 - protein, 9 aa, synthetic construct
MGHGLPSQK

SEQ ID NO: 31279 - protein, 11 aa, synthetic construct
ALATGMKRKHK

SEQ ID NO: 31280 - protein, 9 aa, synthetic construct
RALATGMKR

SEQ ID NO: 31281 - protein, 9 aa, synthetic construct
RSMVPYIVR

SEQ ID NO: 31282 - protein, 9 aa, synthetic construct
AVGIPWTLH

SEQ ID NO: 31283 - protein, 11 aa, synthetic construct
ALATGMRKKHK

SEQ ID NO: 31284 - protein, 11 aa, synthetic construct
RGKQDGKARAK

SEQ ID NO: 31285 - protein, 9 aa, synthetic construct
HLLQFHGAK

SEQ ID NO: 31286 - protein, 11 aa, synthetic construct
KTEPGLSSHYR

SEQ ID NO: 31287 - protein, 11 aa, synthetic construct
KQDGKARAKAK

SEQ ID NO: 31288 - protein, 11 aa, synthetic construct
SCRALATGMRK

SEQ ID NO: 31289 - protein, 11 aa, synthetic construct
SSAPRCLGKGK

SEQ ID NO: 31290 - protein, 10 aa, synthetic construct
TMGHGLPSQK

SEQ ID NO: 31291 - protein, 9 aa, synthetic construct
GVQSGSGHR

SEQ ID NO: 31292 - protein, 9 aa, synthetic construct
ATGMKRKHK

SEQ ID NO: 31293 - protein, 9 aa, synthetic construct
GVRGGSGHR

SEQ ID NO: 31294 - protein, 11 aa, synthetic construct
LQTPSALLGQK

SEQ ID NO: 31295 - protein, 11 aa, synthetic construct
FPELNRNFTSL

SEQ ID NO: 31296 - protein, 9 aa, synthetic construct
VPCIVRQCV

SEQ ID NO: 31297 - protein, 10 aa, synthetic construct
KAPQETSADI

SEQ ID NO: 31298 - protein, 11 aa, synthetic construct
TPITSEVLDTM

SEQ ID NO: 31299 - protein, 8 aa, synthetic construct
TPITSEVL

SEQ ID NO: 31300 - protein, 9 aa, synthetic construct
RTKLRYSDL

SEQ ID NO: 31301 - protein, 9 aa, synthetic construct
KALQTPSAL

SEQ ID NO: 31302 - protein, 9 aa, synthetic construct
TVYRDGSAL

SEQ ID NO: 31303 - protein, 9 aa, synthetic construct
WPLTQVTVY

SEQ ID NO: 31304 - protein, 9 aa, synthetic construct
KAFKCSSTL

SEQ ID NO: 31305 - protein, 11 aa, synthetic construct
ANPPPPAGPSL

SEQ ID NO: 31306 - protein, 9 aa, synthetic construct
IPWTLHTWL

SEQ ID NO: 31307 - protein, 9 aa, synthetic construct
RPRRCRSTE

SEQ ID NO: 31308 - protein, 8 aa, synthetic construct
RPRRCRST

SEQ ID NO: 31309 - protein, 11 aa, synthetic construct
RPRRCRSTESW

SEQ ID NO: 31310 - protein, 10 aa, synthetic construct
RPRRCRSTES

SEQ ID NO: 31311 - protein, 10 aa, synthetic construct
SPGPCPGPSP

SEQ ID NO: 31312 - protein, 11 aa, synthetic construct
GPPTTEGTRGL

SEQ ID NO: 31313 - protein, 9 aa, synthetic construct
LPSWPGASR

SEQ ID NO: 31314 - protein, 8 aa, synthetic construct
FPELNRNF

SEQ ID NO: 31315 - protein, 11 aa, synthetic construct
RDPPNRGPPTT

SEQ ID NO: 31316 - protein, 10 aa, synthetic construct
IPWSATSYTL

SEQ ID NO: 31317 - protein, 10 aa, synthetic construct
WPGASRSGGL

SEQ ID NO: 31318 - protein, 9 aa, synthetic construct
VVTKRERSM

SEQ ID NO: 31319 - protein, 9 aa, synthetic construct
SMRMLRAFL

SEQ ID NO: 31320 - protein, 9 aa, synthetic construct
APQETSADI

SEQ ID NO: 31321 - protein, 10 aa, synthetic construct
NPPPPAGPSL

SEQ ID NO: 31322 - protein, 9 aa, synthetic construct
HPRPRDTTG

SEQ ID NO: 31323 - protein, 8 aa, synthetic construct
HPRPRDTT

SEQ ID NO: 31324 - protein, 9 aa, synthetic construct
VREKKEGCY

SEQ ID NO: 31325 - protein, 9 aa, synthetic construct
RRCRSTESW

SEQ ID NO: 31326 - protein, 9 aa, synthetic construct
KRKASMRML

SEQ ID NO: 31327 - protein, 11 aa, synthetic construct
YRHSSSVSQTF

SEQ ID NO: 31328 - protein, 11 aa, synthetic construct
VRGGSGHRQLL

SEQ ID NO: 31329 - protein, 11 aa, synthetic construct
DIRSIGIPWTL

SEQ ID NO: 31330 - protein, 10 aa, synthetic construct
PRRCRSTESW

SEQ ID NO: 31331 - protein, 10 aa, synthetic construct
RERSMVPYIV

SEQ ID NO: 31332 - protein, 10 aa, synthetic construct
RRCRSTESWI

SEQ ID NO: 31333 - protein, 9 aa, synthetic construct
YRHSSSVSQ

SEQ ID NO: 31334 - protein, 9 aa, synthetic construct
KRERSMVPY

SEQ ID NO: 31335 - protein, 9 aa, synthetic construct
GKTLLVRSY

SEQ ID NO: 31336 - protein, 8 aa, synthetic construct
IRSIGIPW

SEQ ID NO: 31337 - protein, 11 aa, synthetic construct
IRSIGIPWTLH

SEQ ID NO: 31338 - protein, 10 aa, synthetic construct
IRSIGIPWTL

SEQ ID NO: 31339 - protein, 9 aa, synthetic construct
ERSMVPYIV

SEQ ID NO: 31340 - protein, 10 aa, synthetic construct
VRGGSGHRQL

SEQ ID NO: 31341 - protein, 9 aa, synthetic construct
KRKHKISGM

SEQ ID NO: 31342 - protein, 11 aa, synthetic construct
IQFLFNPAVTF

SEQ ID NO: 31343 - protein, 10 aa, synthetic construct
RHSSSVSQTF

SEQ ID NO: 31344 - protein, 9 aa, synthetic construct
QREPDGEGL

SEQ ID NO: 31345 - protein, 11 aa, synthetic construct
KRKHKISGMIL

SEQ ID NO: 31346 - protein, 11 aa, synthetic construct
ERSEDPPKRMY

SEQ ID NO: 31347 - protein, 9 aa, synthetic construct
NQCFIQFLF

SEQ ID NO: 31348 - protein, 10 aa, synthetic construct
HAGLGSQPYY

SEQ ID NO: 31349 - protein, 9 aa, synthetic construct
HAGLGSQPY

SEQ ID NO: 31350 - protein, 9 aa, synthetic construct
SEDPPKRMY

SEQ ID NO: 31351 - protein, 9 aa, synthetic construct
VAEDVSWHL

SEQ ID NO: 31352 - protein, 11 aa, synthetic construct
RSEDPPKRMYF

SEQ ID NO: 31353 - protein, 9 aa, synthetic construct
ITSEVLDTM

SEQ ID NO: 31354 - protein, 9 aa, synthetic construct
LAAAVGIPW

SEQ ID NO: 31355 - protein, 10 aa, synthetic construct
RSEDPPKRMY

SEQ ID NO: 31356 - protein, 11 aa, synthetic construct
FMDPATFTNMY

SEQ ID NO: 31357 - protein, 10 aa, synthetic construct
LAKGTVQTSM

SEQ ID NO: 31358 - protein, 9 aa, synthetic construct
RSEDPPKRM

SEQ ID NO: 31359 - protein, 10 aa, synthetic construct
SVFPELNRNF

SEQ ID NO: 31360 - protein, 9 aa, synthetic construct
AGLGSQPYY

SEQ ID NO: 31361 - protein, 8 aa, synthetic construct
LQFHGAKY

SEQ ID NO: 31362 - protein, 9 aa, synthetic construct
ASMRMLRAF

SEQ ID NO: 31363 - protein, 10 aa, synthetic construct
AAAVGIPWTL

SEQ ID NO: 31364 - protein, 8 aa, synthetic construct
WHSVFPEL

SEQ ID NO: 31365 - protein, 10 aa, synthetic construct
QFLFNPAVTF

SEQ ID NO: 31366 - protein, 9 aa, synthetic construct
VFPELNRNF

SEQ ID NO: 31367 - protein, 9 aa, synthetic construct
GYNPVTGIF

SEQ ID NO: 31368 - protein, 9 aa, synthetic construct
SHYRHSSSV

SEQ ID NO: 31369 - protein, 8 aa, synthetic construct
LFNPAVTF

SEQ ID NO: 31370 - protein, 9 aa, synthetic construct
DYVMLTIHM

SEQ ID NO: 31371 - protein, 11 aa, synthetic construct
HSGYNPVTGIF

SEQ ID NO: 31372 - protein, 10 aa, synthetic construct
SGYNPVTGIF

SEQ ID NO: 31373 - protein, 9 aa, synthetic construct
DYKQALGQY

SEQ ID NO: 31374 - protein, 9 aa, synthetic construct
YKQALGQYM

SEQ ID NO: 31375 - protein, 9 aa, synthetic construct
SWHSVFPEL

SEQ ID NO: 31376 - protein, 8 aa, synthetic construct
MRMLRAFL

SEQ ID NO: 31377 - protein, 8 aa, synthetic construct
VYRDGSAL

SEQ ID NO: 31378 - protein, 15 aa, synthetic construct
ALATGMKRKHKISGM

SEQ ID NO: 31379 - protein, 15 aa, synthetic construct
GKAFKCSSTLTTHKR

SEQ ID NO: 31380 - protein, 15 aa, synthetic construct
MDPATFTNMYNRPIH

SEQ ID NO: 31381 - protein, 15 aa, synthetic construct
VCGYLARRRIRLWHR

SEQ ID NO: 31382 - protein, 15 aa, synthetic construct
GYVDVTIDIRSIGIP

SEQ ID NO: 31383 - protein, 15 aa, synthetic construct
LATGMRKKHKISGMI

SEQ ID NO: 31384 - protein, 15 aa, synthetic construct
ATGMKRKHKISGMIL

SEQ ID NO: 31385 - protein, 15 aa, synthetic construct
SSHYRHSSSVSQTFS

SEQ ID NO: 31386 - protein, 15 aa, synthetic construct
YPELVLKAPLDGEEQ

SEQ ID NO: 31387 - protein, 15 aa, synthetic construct
KASMRMLRAFLSEVQ

SEQ ID NO: 31388 - protein, 15 aa, synthetic construct
PATFTNMYNRPIHIT

SEQ ID NO: 31389 - protein, 15 aa, synthetic construct
DDYVFVMPVEVDSAG

SEQ ID NO: 31390 - protein, 15 aa, synthetic construct
KVVLEAMARDPPNRG

SEQ ID NO: 31391 - protein, 15 aa, synthetic construct
LQCLNSLQREPDGEG

SEQ ID NO: 31392 - protein, 15 aa, synthetic construct
FLDYVMLTIHMGCHG

SEQ ID NO: 31393 - protein, 15 aa, synthetic construct
KAFKCSSTLTTHKRI

SEQ ID NO: 31394 - protein, 15 aa, synthetic construct
QRVVREKKEGCYTNR

SEQ ID NO: 31395 - protein, 15 aa, synthetic construct
GLSSHYRHSSSVSQT

SEQ ID NO: 31396 - protein, 15 aa, synthetic construct
EPGLSSHYRHSSSVS

SEQ ID NO: 31397 - protein, 15 aa, synthetic construct
FGVKIAVVTKRERSM

SEQ ID NO: 31398 - protein, 15 aa, synthetic construct
GYILVYSAKRKASMR

SEQ ID NO: 31399 - protein, 15 aa, synthetic construct
KIAVVTKRERSKVPC

SEQ ID NO: 31400 - protein, 15 aa, synthetic construct
AAKFMAAHITANTNP

SEQ ID NO: 31401 - protein, 15 aa, synthetic construct
ATGMRKKHKISGMIL

SEQ ID NO: 31402 - protein, 15 aa, synthetic construct
VTVMKVEKAPQETSA

SEQ ID NO: 31403 - protein, 15 aa, synthetic construct
LVTVMKVEKAPQETS

SEQ ID NO: 31404 - protein, 15 aa, synthetic construct
LIQRVVREKKEGCYT

SEQ ID NO: 31405 - protein, 15 aa, synthetic construct
LLGLIQRVVREKKEG

SEQ ID NO: 31406 - protein, 15 aa, synthetic construct
LSSHYRHSSSVSQTF

SEQ ID NO: 31407 - protein, 15 aa, synthetic construct
DPTLICSPTHAGLGS

SEQ ID NO: 31408 - protein, 15 aa, synthetic construct
GLIQRVVREKKEGCY

SEQ ID NO: 31409 - protein, 15 aa, synthetic construct
DPATFTNMYNRPIHI

SEQ ID NO: 31410 - protein, 15 aa, synthetic construct
LATGMKRKHKISGMI

SEQ ID NO: 31411 - protein, 15 aa, synthetic construct
NDDYVFVMPVEVDSA

SEQ ID NO: 31412 - protein, 15 aa, synthetic construct
GLNDDYVFVMPVEVD

SEQ ID NO: 31413 - protein, 15 aa, synthetic construct
SSTLTTHKRIHTADK

SEQ ID NO: 31414 - protein, 15 aa, synthetic construct
QSPHIRRLSGIRAYF

SEQ ID NO: 31415 - protein, 15 aa, synthetic construct
IQRVVREKKEGCYTN

SEQ ID NO: 31416 - protein, 15 aa, synthetic construct
AQLLGLIQRVVREKK

SEQ ID NO: 31417 - protein, 15 aa, synthetic construct
VKIAVVTKRERSMVP

SEQ ID NO: 31418 - protein, 15 aa, synthetic construct
FQSPHIRRLSGIRAY

SEQ ID NO: 31419 - protein, 15 aa, synthetic construct
ALATGMRKKHKISGM

SEQ ID NO: 31420 - protein, 15 aa, synthetic construct
LFLDYVMLTIHMGCH

SEQ ID NO: 31421 - protein, 15 aa, synthetic construct
GVKIAVVTKRERSMV

SEQ ID NO: 31422 - protein, 15 aa, synthetic construct
LDYVMLTIHMGCHGF

SEQ ID NO: 31423 - protein, 15 aa, synthetic construct
ILVYSAKRKASMRML

SEQ ID NO: 31424 - protein, 15 aa, synthetic construct
KRKASMRMLRAFLSE

SEQ ID NO: 31425 - protein, 15 aa, synthetic construct
GAKYAAIDPSMVSAE

SEQ ID NO: 31426 - protein, 15 aa, synthetic construct
RKASMRMLRAFLSEV

SEQ ID NO: 31427 - protein, 15 aa, synthetic construct
YILVYSAKRKASMRM

SEQ ID NO: 31428 - protein, 15 aa, synthetic construct
VVLEAMARDPPNRGP

SEQ ID NO: 31429 - protein, 15 aa, synthetic construct
HGAKYAAIDPSMVSA

SEQ ID NO: 31430 - protein, 15 aa, synthetic construct
CLQCLNSLQREPDGE

SEQ ID NO: 31431 - protein, 15 aa, synthetic construct
CGKAFKCSSTLTTHK

SEQ ID NO: 31432 - protein, 15 aa, synthetic construct
LNDDYVFVMPVEVDS

SEQ ID NO: 31433 - protein, 15 aa, synthetic construct
NQCFIQFLFNPAVTF

SEQ ID NO: 31434 - protein, 15 aa, synthetic construct
TNNLMLVTFQSPHIR

SEQ ID NO: 31435 - protein, 15 aa, synthetic construct
RMLRAFLSEVQDTIP

SEQ ID NO: 31436 - protein, 15 aa, synthetic construct
NNLMLVTFQSPHIRR

SEQ ID NO: 31437 - protein, 15 aa, synthetic construct
ASMRMLRAFLSEVQD

SEQ ID NO: 31438 - protein, 15 aa, synthetic construct
QAGVCGYLARRRIRL

SEQ ID NO: 31439 - protein, 15 aa, synthetic construct
FPELNRNFTSLSLDD

SEQ ID NO: 31440 - protein, 15 aa, synthetic construct
SMRMLRAFLSEVQDT

SEQ ID NO: 31441 - protein, 15 aa, synthetic construct
STNNLMLVTFQSPHI

SEQ ID NO: 31442 - protein, 15 aa, synthetic construct
LMLVTFQSPHIRRLS

SEQ ID NO: 31443 - protein, 15 aa, synthetic construct
QCFIQFLFNPAVTFG

SEQ ID NO: 31444 - protein, 15 aa, synthetic construct
RSMVPYIVRQCVEEI

SEQ ID NO: 31445 - protein, 15 aa, synthetic construct
TQVTVYRDGSALGPP

SEQ ID NO: 31446 - protein, 15 aa, synthetic construct
QVTVYRDGSALGPPG

SEQ ID NO: 31447 - protein, 15 aa, synthetic construct
IHLLQFHGAKYAAID

SEQ ID NO: 31448 - protein, 15 aa, synthetic construct
RERSMVPYIVRQCVE

SEQ ID NO: 31449 - protein, 15 aa, synthetic construct
CFIQFLFNPAVTFGT

SEQ ID NO: 31450 - protein, 15 aa, synthetic construct
LTQVTVYRDGSALGP

SEQ ID NO: 31451 - protein, 15 aa, synthetic construct
SETPLQLAAAVGIPW

SEQ ID NO: 31452 - protein, 15 aa, synthetic construct
WPLTQVTVYRDGSAL

SEQ ID NO: 31453 - protein, 15 aa, synthetic construct
ETPLQLAAAVGIPWT

SEQ ID NO: 31454 - protein, 15 aa, synthetic construct
PLTQVTVYRDGSALG

SEQ ID NO: 31455 - protein, 15 aa, synthetic construct
MRPIKTEPGLSSHYR

SEQ ID NO: 31456 - protein, 15 aa, synthetic construct
GHEAAKFMAAHITAN

SEQ ID NO: 31457 - protein, 15 aa, synthetic construct
KRERSMVPYIVRQCV

SEQ ID NO: 31458 - protein, 15 aa, synthetic construct
DWPLTQVTVYRDGSA

SEQ ID NO: 31459 - protein, 15 aa, synthetic construct
MLVTFQSPHIRRLSG

SEQ ID NO: 31460 - protein, 15 aa, synthetic construct
PELNRNFTSLSLDDS

SEQ ID NO: 31461 - protein, 15 aa, synthetic construct
TFQSPHIRRLSGIRA

SEQ ID NO: 31462 - protein, 15 aa, synthetic construct
IQAGVCGYLARRRIR

SEQ ID NO: 31463 - protein, 15 aa, synthetic construct
ATFTNMYNRPIHITL

SEQ ID NO: 31464 - protein, 15 aa, synthetic construct
GNDLFREKDYKQALG

SEQ ID NO: 31465 - protein, 15 aa, synthetic construct
NLMLVTFQSPHIRRL

SEQ ID NO: 31466 - protein, 15 aa, synthetic construct
SADIGGLDNQIQEIK

SEQ ID NO: 31467 - protein, 15 aa, synthetic construct
DNQCFIQFLFNPAVT

SEQ ID NO: 31468 - protein, 15 aa, synthetic construct
QIHLLQFHGAKYAAI

SEQ ID NO: 31469 - protein, 15 aa, synthetic construct
MRMLRAFLSEVQDTI

SEQ ID NO: 31470 - protein, 15 aa, synthetic construct
ERSMVPYIVRQCVEE

SEQ ID NO: 31471 - protein, 15 aa, synthetic construct
YVQIHLLQFHGAKYA

SEQ ID NO: 31472 - protein, 15 aa, synthetic construct
VQIHLLQFHGAKYAA

SEQ ID NO: 31473 - protein, 15 aa, synthetic construct
REKDYKQALGQYMEG

SEQ ID NO: 31474 - protein, 15 aa, synthetic construct
HLLQFHGAKYAAIDP

SEQ ID NO: 31475 - protein, 15 aa, synthetic construct
NDGSWHSVFPELNRN

SEQ ID NO: 31476 - protein, 15 aa, synthetic construct
KAPQETSADIGGLDN

SEQ ID NO: 31477 - protein, 15 aa, synthetic construct
FNPAVTFGTAIAAFY

SEQ ID NO: 31478 - protein, 15 aa, synthetic construct
AKTIFTGHTAVAEDV

SEQ ID NO: 31479 - protein, 15 aa, synthetic construct
DGSWHSVFPELNRNF

SEQ ID NO: 31480 - protein, 15 aa, synthetic construct
YDPTLICSPTHAGLG

SEQ ID NO: 31481 - protein, 15 aa, synthetic construct
AGPGTGAQPLWGVQS

SEQ ID NO: 31482 - protein, 15 aa, synthetic construct
EKDYKQALGQYMEGL

SEQ ID NO: 31483 - protein, 15 aa, synthetic construct
DAKTIFTGHTAVAED

SEQ ID NO: 31484 - protein, 15 aa, synthetic construct
LEAMARDPPNRGPPT

SEQ ID NO: 31485 - protein, 15 aa, synthetic construct
KTIFTGHTAVAEDVS

SEQ ID NO: 31486 - protein, 15 aa, synthetic construct
TIFTGHTAVAEDVSW

SEQ ID NO: 31487 - protein, 15 aa, synthetic construct
TSADIGGLDNQIQEI

SEQ ID NO: 31488 - protein, 15 aa, synthetic construct
AGPGTGAQPLWGVRG

SEQ ID NO: 31489 - protein, 15 aa, synthetic construct
SGTLSFTSAEDHEDD

SEQ ID NO: 31490 - protein, 15 aa, synthetic construct
LSGTLSFTSAEDHED

SEQ ID NO: 31491 - protein, 15 aa, synthetic construct
LLQFHGAKYAAIDPS

SEQ ID NO: 31492 - protein, 15 aa, synthetic construct
LSFTSAEDHEDDEDE

SEQ ID NO: 31493 - protein, 15 aa, synthetic construct
GDGTSGEDAELSPPP

SEQ ID NO: 31494 - protein, 15 aa, synthetic construct
MPVEVDSAGSYISHD

SEQ ID NO: 31495 - protein, 15 aa, synthetic construct
IFTGHTAVAEDVSWH

SEQ ID NO: 31496 - protein, 15 aa, synthetic construct
DTGDTGANPPPPAGP

SEQ ID NO: 31497 - protein, 15 aa, synthetic construct
QFHGAKYAAIDPSMV

SEQ ID NO: 31498 - protein, 15 aa, synthetic construct
SHYRHSSSVSQTFSV

SEQ ID NO: 31499 - protein, 15 aa, synthetic construct
ETSADIGGLDNQIQE

SEQ ID NO: 31500 - protein, 15 aa, synthetic construct
FMAAHITANTNPFSW

SEQ ID NO: 31501 - protein, 15 aa, synthetic construct
SFTSAEDHEDDEDED

SEQ ID NO: 31502 - protein, 15 aa, synthetic construct
QPLWGVQSGSGHRQL

SEQ ID NO: 31503 - protein, 15 aa, synthetic construct
GEAAASPEAEQFPET

SEQ ID NO: 31504 - protein, 15 aa, synthetic construct
KFMAAHITANTNPFS

SEQ ID NO: 31505 - protein, 15 aa, synthetic construct
WPGASRSGGLEESRD

SEQ ID NO: 31506 - protein, 15 aa, synthetic construct
AKFMAAHITANTNPF

SEQ ID NO: 31507 - protein, 15 aa, synthetic construct
LGDGTSGEDAELSPP

SEQ ID NO: 31508 - protein, 15 aa, synthetic construct
AQPLWGVQSGSGHRQ

SEQ ID NO: 31509 - protein, 15 aa, synthetic construct
DGKARAKAKTRSSRA

SEQ ID NO: 31510 - protein, 15 aa, synthetic construct
VDAKTIFTGHTAVAE

SEQ ID NO: 31511 - protein, 15 aa, synthetic construct
LQFHGAKYAAIDPSM

SEQ ID NO: 31512 - protein, 15 aa, synthetic construct
VLEAMARDPPNRGPP

SEQ ID NO: 31513 - protein, 15 aa, synthetic construct
GAQPLWGVQSGSGHR

SEQ ID NO: 31514 - protein, 15 aa, synthetic construct
VTVYRDGSALGPPGP

SEQ ID NO: 31515 - protein, 15 aa, synthetic construct
EAAKFMAAHITANTN

SEQ ID NO: 31516 - protein, 15 aa, synthetic construct
TLSFTSAEDHEDDED

SEQ ID NO: 31517 - protein, 15 aa, synthetic construct
GTLSFTSAEDHEDDE

SEQ ID NO: 31518 - protein, 15 aa, synthetic construct
FHGAKYAAIDPSMVS

SEQ ID NO: 31519 - protein, 15 aa, synthetic construct
GTKGHEAAKFMAAHI

SEQ ID NO: 31520 - protein, 15 aa, synthetic construct
CQENSDEAKALQTPS

SEQ ID NO: 31521 - protein, 15 aa, synthetic construct
FTNMYNRPIHITLDS

SEQ ID NO: 31522 - protein, 15 aa, synthetic construct
MKMGSLERTKLRYSD

SEQ ID NO: 31523 - protein, 15 aa, synthetic construct
TKGHEAAKFMAAHIT

SEQ ID NO: 31524 - protein, 15 aa, synthetic construct
GSLERTKLRYSDLDF

SEQ ID NO: 31525 - protein, 15 aa, synthetic construct
GPGTGAQPLWGVRGG

SEQ ID NO: 31526 - protein, 15 aa, synthetic construct
GPGTGAQPLWGVQSG

SEQ ID NO: 31527 - protein, 15 aa, synthetic construct
TNMYNRPIHITLDSE

SEQ ID NO: 31528 - protein, 15 aa, synthetic construct
HEAAKFMAAHITANT

SEQ ID NO: 31529 - protein, 15 aa, synthetic construct
QDWPLTQVTVYRDGS

SEQ ID NO: 31530 - protein, 15 aa, synthetic construct
EAKALQTPSALLGQK

SEQ ID NO: 31531 - protein, 15 aa, synthetic construct
MGSLERTKLRYSDLD

SEQ ID NO: 31532 - protein, 15 aa, synthetic construct
NYSETPLQLAAAVGI

SEQ ID NO: 31533 - protein, 15 aa, synthetic construct
KMGSLERTKLRYSDL

SEQ ID NO: 31534 - protein, 15 aa, synthetic construct
ALQTPSALLGQKSNT

SEQ ID NO: 31535 - protein, 15 aa, synthetic construct
QENSDEAKALQTPSA

SEQ ID NO: 31536 - protein, 15 aa, synthetic construct
RAGPGTGAQPLWGVQ

SEQ ID NO: 31537 - protein, 15 aa, synthetic construct
SRLSGTLSFTSAEDH

SEQ ID NO: 31538 - protein, 15 aa, synthetic construct
AKALQTPSALLGQKS

SEQ ID NO: 31539 - protein, 15 aa, synthetic construct
WQDWPLTQVTVYRDG

SEQ ID NO: 31540 - protein, 15 aa, synthetic construct
KALQTPSALLGQKSN

SEQ ID NO: 31541 - protein, 15 aa, synthetic construct
SQQSPEGGGGAGARG

SEQ ID NO: 31542 - protein, 15 aa, synthetic construct
VPGSTMKMGSLERTK

SEQ ID NO: 31543 - protein, 15 aa, synthetic construct
RSQQSPEGGGGAGAR

SEQ ID NO: 31544 - protein, 15 aa, synthetic construct
VKDIPWSATSYTLSL

SEQ ID NO: 31545 - protein, 15 aa, synthetic construct
DGTSGEDAELSPPPD

SEQ ID NO: 31546 - protein, 15 aa, synthetic construct
GRSQQSPEGGGGAGA

SEQ ID NO: 31547 - protein, 15 aa, synthetic construct
GSTMKMGSLERTKLR

SEQ ID NO: 31548 - protein, 15 aa, synthetic construct
VVDAKTIFTGHTAVA

SEQ ID NO: 31549 - protein, 15 aa, synthetic construct
ITIQAGVCGYLARRR

SEQ ID NO: 31550 - protein, 15 aa, synthetic construct
AVITIQAGVCGYLAR

SEQ ID NO: 31551 - protein, 15 aa, synthetic construct
FREKDYKQALGQYME

SEQ ID NO: 31552 - protein, 15 aa, synthetic construct
FVMPVEVDSAGSYIS

SEQ ID NO: 31553 - protein, 15 aa, synthetic construct
VMPVEVDSAGSYISH

SEQ ID NO: 31554 - protein, 15 aa, synthetic construct
FIQFLFNPAVTFGTA

SEQ ID NO: 31555 - protein, 15 aa, synthetic construct
FLFNPAVTFGTAIAA

SEQ ID NO: 31556 - protein, 15 aa, synthetic construct
QFLFNPAVTFGTAIA

SEQ ID NO: 31557 - protein, 15 aa, synthetic construct
KDIPWSATSYTLSLD

SEQ ID NO: 31558 - protein, 15 aa, synthetic construct
TVYRDGSALGPPGPN

SEQ ID NO: 31559 - protein, 15 aa, synthetic construct
GSWHSVFPELNRNFT

SEQ ID NO: 31560 - protein, 15 aa, synthetic construct
LFNPAVTFGTAIAAF

SEQ ID NO: 31561 - protein, 15 aa, synthetic construct
AVNDGSWHSVFPELN

SEQ ID NO: 31562 - protein, 15 aa, synthetic construct
LAVITIQAGVCGYLA

SEQ ID NO: 31563 - protein, 15 aa, synthetic construct
YSETPLQLAAAVGIP

SEQ ID NO: 31564 - protein, 15 aa, synthetic construct
QSPEGGGGAGARGGA

SEQ ID NO: 31565 - protein, 15 aa, synthetic construct
QQSPEGGGGAGARGG

SEQ ID NO: 31566 - protein, 15 aa, synthetic construct
EQFPETSELEDDDAE

SEQ ID NO: 31567 - protein, 15 aa, synthetic construct
PGSTMKMGSLERTKL

SEQ ID NO: 31568 - protein, 15 aa, synthetic construct
FVKDIPWSATSYTLS

SEQ ID NO: 31569 - protein, 15 aa, synthetic construct
IQFLFNPAVTFGTAI

SEQ ID NO: 31570 - protein, 15 aa, synthetic construct
VITIQAGVCGYLARR

SEQ ID NO: 31571 - protein, 15 aa, synthetic construct
VNDGSWHSVFPELNR

SEQ ID NO: 31572 - protein, 15 aa, synthetic construct
DRTLYNGHSGYNPVT

SEQ ID NO: 31573 - protein, 15 aa, synthetic construct
VTKRERSMVPYIVRQ

SEQ ID NO: 31574 - protein, 15 aa, synthetic construct
QDGKARAKAKTRSSR

SEQ ID NO: 31575 - protein, 15 aa, synthetic construct
VVTKRERSMVPYIVR

SEQ ID NO: 31576 - protein, 15 aa, synthetic construct
VFVMPVEVDSAGSYI

SEQ ID NO: 31577 - protein, 15 aa, synthetic construct
AKYAAIDPSMVSAEE

SEQ ID NO: 31578 - protein, 15 aa, synthetic construct
KGHEAAKFMAAHITA

SEQ ID NO: 31579 - protein, 15 aa, synthetic construct
DYVFVMPVEVDSAGS

SEQ ID NO: 31580 - protein, 15 aa, synthetic construct
YVFVMPVEVDSAGSY

SEQ ID NO: 31581 - protein, 15 aa, synthetic construct
KLALCWARALPSWPG

SEQ ID NO: 31582 - protein, 9 aa, synthetic construct
QAIFASHRK

SEQ ID NO: 31583 - protein, 8 aa, synthetic construct
AIFASHRK

SEQ ID NO: 31584 - protein, 10 aa, synthetic construct
GQAIFASHRK

SEQ ID NO: 31585 - protein, 9 aa, synthetic construct
AIFASHRKM

SEQ ID NO: 31586 - protein, 8 aa, synthetic construct
IFASHRKM

SEQ ID NO: 31587 - protein, 15 aa, synthetic construct
VDKIKGQAIFASHRK

SEQ ID NO: 31588 - protein, 15 aa, synthetic construct
SECVDKIKGQAIFAS

SEQ ID NO: 31589 - protein, 15 aa, synthetic construct
LSECVDKIKGQAIFA

SEQ ID NO: 31590 - protein, 15 aa, synthetic construct
CVDKIKGQAIFASHR

SEQ ID NO: 31591 - protein, 15 aa, synthetic construct
DKIKGQAIFASHRKM

SEQ ID NO: 31592 - protein, 15 aa, synthetic construct
ECVDKIKGQAIFASH

SEQ ID NO: 31593 - protein, 15 aa, synthetic construct
SLPPPGSEEEEEEDE

SEQ ID NO: 31594 - protein, 15 aa, synthetic construct
LPPPGSEEEEEEDET

SEQ ID NO: 31595 - protein, 15 aa, synthetic construct
KIKGQAIFASHRKMP

SEQ ID NO: 31596 - protein, 9 aa, synthetic construct
RLKKEWEAL

SEQ ID NO: 31597 - protein, 10 aa, synthetic construct
SLISALHYLV

SEQ ID NO: 31598 - protein, 9 aa, synthetic construct
FLWQSKREC

SEQ ID NO: 31599 - protein, 11 aa, synthetic construct
TLLDHWVFGEA

SEQ ID NO: 31600 - protein, 9 aa, synthetic construct
ILPNCVSSL

SEQ ID NO: 31601 - protein, 9 aa, synthetic construct
KLFIPQINT

SEQ ID NO: 31602 - protein, 9 aa, synthetic construct
LISALHYLV

SEQ ID NO: 31603 - protein, 11 aa, synthetic construct
AHSLISALHYL

SEQ ID NO: 31604 - protein, 9 aa, synthetic construct
NLSKDHYTL

SEQ ID NO: 31605 - protein, 10 aa, synthetic construct
HSLISALHYL

SEQ ID NO: 31606 - protein, 9 aa, synthetic construct
FLWQPTREC

SEQ ID NO: 31607 - protein, 9 aa, synthetic construct
FLWHPKREC

SEQ ID NO: 31608 - protein, 10 aa, synthetic construct
GTDEPRVITV

SEQ ID NO: 31609 - protein, 9 aa, synthetic construct
SLISALHYL

SEQ ID NO: 31610 - protein, 9 aa, synthetic construct
CIIEHTNPA

SEQ ID NO: 31611 - protein, 9 aa, synthetic construct
STFTISQSV

SEQ ID NO: 31612 - protein, 9 aa, synthetic construct
HSLISALHY

SEQ ID NO: 31613 - protein, 9 aa, synthetic construct
CVSSLYLYY

SEQ ID NO: 31614 - protein, 11 aa, synthetic construct
ELIKNTQTSTF

SEQ ID NO: 31615 - protein, 10 aa, synthetic construct
CIIEHTNPAF

SEQ ID NO: 31616 - protein, 10 aa, synthetic construct
VQEIEVIGGY

SEQ ID NO: 31617 - protein, 9 aa, synthetic construct
SSVHNIEGF

SEQ ID NO: 31618 - protein, 9 aa, synthetic construct
DTRPRFLWH

SEQ ID NO: 31619 - protein, 9 aa, synthetic construct
NCVSSLYLY

SEQ ID NO: 31620 - protein, 10 aa, synthetic construct
NCVSSLYLYY

SEQ ID NO: 31621 - protein, 9 aa, synthetic construct
LPNCVSSLY

SEQ ID NO: 31622 - protein, 9 aa, synthetic construct
QEIEVIGGY

SEQ ID NO: 31623 - protein, 9 aa, synthetic construct
EASDVSRNR

SEQ ID NO: 31624 - protein, 11 aa, synthetic construct
TVQEIEVIGGY

SEQ ID NO: 31625 - protein, 10 aa, synthetic construct
QINTKHSGLY

SEQ ID NO: 31626 - protein, 9 aa, synthetic construct
GTQGEEGAY

SEQ ID NO: 31627 - protein, 9 aa, synthetic construct
FIMSSSGDY

SEQ ID NO: 31628 - protein, 9 aa, synthetic construct
STNWNFLFF

SEQ ID NO: 31629 - protein, 10 aa, synthetic construct
DILPNCVSSL

SEQ ID NO: 31630 - protein, 11 aa, synthetic construct
DILPNCVSSLY

SEQ ID NO: 31631 - protein, 10 aa, synthetic construct
EVYFTALFPY

SEQ ID NO: 31632 - protein, 8 aa, synthetic construct
EVYFTALF

SEQ ID NO: 31633 - protein, 9 aa, synthetic construct
FVYTLLDHW

SEQ ID NO: 31634 - protein, 8 aa, synthetic construct
NTKHSGLY

SEQ ID NO: 31635 - protein, 9 aa, synthetic construct
GMASRGPAY

SEQ ID NO: 31636 - protein, 9 aa, synthetic construct
SSGDYEILY

SEQ ID NO: 31637 - protein, 9 aa, synthetic construct
KSNVAFMSY

SEQ ID NO: 31638 - protein, 11 aa, synthetic construct
YAHSLISALHY

SEQ ID NO: 31639 - protein, 9 aa, synthetic construct
SNVAFMSYF

SEQ ID NO: 31640 - protein, 11 aa, synthetic construct
DQGTQGEEGAY

SEQ ID NO: 31641 - protein, 9 aa, synthetic construct
FSTNWNFLF

SEQ ID NO: 31642 - protein, 9 aa, synthetic construct
YAHSLISAL

SEQ ID NO: 31643 - protein, 10 aa, synthetic construct
SSSGDYEILY

SEQ ID NO: 31644 - protein, 10 aa, synthetic construct
ILPNCVSSLY

SEQ ID NO: 31645 - protein, 9 aa, synthetic construct
FIPQINTKH

SEQ ID NO: 31646 - protein, 9 aa, synthetic construct
HIVAVPTPL

SEQ ID NO: 31647 - protein, 8 aa, synthetic construct
MASRGPAY

SEQ ID NO: 31648 - protein, 8 aa, synthetic construct
SLISALHY

SEQ ID NO: 31649 - protein, 9 aa, synthetic construct
KSSGKEVYF

SEQ ID NO: 31650 - protein, 9 aa, synthetic construct
IIEHTNPAF

SEQ ID NO: 31651 - protein, 10 aa, synthetic construct
KGIHTGEKPY

SEQ ID NO: 31652 - protein, 11 aa, synthetic construct
FLWQPTRECHF

SEQ ID NO: 31653 - protein, 10 aa, synthetic construct
GIKSSGKEVY

SEQ ID NO: 31654 - protein, 11 aa, synthetic construct
GIKSSGKEVYF

SEQ ID NO: 31655 - protein, 9 aa, synthetic construct
WQSKRECHF

SEQ ID NO: 31656 - protein, 9 aa, synthetic construct
SQVECTGAH

SEQ ID NO: 31657 - protein, 9 aa, synthetic construct
IKSSGKEVY

SEQ ID NO: 31658 - protein, 10 aa, synthetic construct
IGMASRGPAY

SEQ ID NO: 31659 - protein, 11 aa, synthetic construct
AERDGKSNVAF

SEQ ID NO: 31660 - protein, 9 aa, synthetic construct
WQPTRECHF

SEQ ID NO: 31661 - protein, 10 aa, synthetic construct
LIKNTQTSTF

SEQ ID NO: 31662 - protein, 9 aa, synthetic construct
IKNTQTSTF

SEQ ID NO: 31663 - protein, 9 aa, synthetic construct
GLQKHIRTH

SEQ ID NO: 31664 - protein, 10 aa, synthetic construct
IIEHTNPAFF

SEQ ID NO: 31665 - protein, 10 aa, synthetic construct
EAEKGSKLKI

SEQ ID NO: 31666 - protein, 9 aa, synthetic construct
HEAEKGSKL

SEQ ID NO: 31667 - protein, 11 aa, synthetic construct
SVGEKSVTQRW

SEQ ID NO: 31668 - protein, 9 aa, synthetic construct
KEVYFTALF

SEQ ID NO: 31669 - protein, 11 aa, synthetic construct
HEAEKGSKLKI

SEQ ID NO: 31670 - protein, 10 aa, synthetic construct
VHEAEKGSKL

SEQ ID NO: 31671 - protein, 10 aa, synthetic construct
AEKGSKLKIL

SEQ ID NO: 31672 - protein, 10 aa, synthetic construct
SERYGPMFTI

SEQ ID NO: 31673 - protein, 9 aa, synthetic construct
RDGKSNVAF

SEQ ID NO: 31674 - protein, 11 aa, synthetic construct
SGKEVYFTALF

SEQ ID NO: 31675 - protein, 8 aa, synthetic construct
TEAEPEAL

SEQ ID NO: 31676 - protein, 9 aa, synthetic construct
DEPRVITVL

SEQ ID NO: 31677 - protein, 10 aa, synthetic construct
GKEVYFTALF

SEQ ID NO: 31678 - protein, 9 aa, synthetic construct
AERDGKSNV

SEQ ID NO: 31679 - protein, 10 aa, synthetic construct
QEIEVIGGYL

SEQ ID NO: 31680 - protein, 9 aa, synthetic construct
NKNRLKKEW

SEQ ID NO: 31681 - protein, 9 aa, synthetic construct
AEKGSKLKI

SEQ ID NO: 31682 - protein, 10 aa, synthetic construct
KKEWEALCAY

SEQ ID NO: 31683 - protein, 8 aa, synthetic construct
SERYGPMF

SEQ ID NO: 31684 - protein, 11 aa, synthetic construct
KEVYFTALFPY

SEQ ID NO: 31685 - protein, 8 aa, synthetic construct
GTDEPRVI

SEQ ID NO: 31686 - protein, 9 aa, synthetic construct
GTDEPRVIT

SEQ ID NO: 31687 - protein, 11 aa, synthetic construct
KGDCNDSVQVV

SEQ ID NO: 31688 - protein, 9 aa, synthetic construct
ISERYGPMF

SEQ ID NO: 31689 - protein, 9 aa, synthetic construct
MSSSGDYEI

SEQ ID NO: 31690 - protein, 9 aa, synthetic construct
FGAVSNVKV

SEQ ID NO: 31691 - protein, 11 aa, synthetic construct
GTDEPRVITVL

SEQ ID NO: 31692 - protein, 9 aa, synthetic construct
YGPMFTIHL

SEQ ID NO: 31693 - protein, 9 aa, synthetic construct
NNDLTSRNL

SEQ ID NO: 31694 - protein, 9 aa, synthetic construct
KRYPTVQEI

SEQ ID NO: 31695 - protein, 9 aa, synthetic construct
LSKDHYTLI

SEQ ID NO: 31696 - protein, 8 aa, synthetic construct
LSKDHYTL

SEQ ID NO: 31697 - protein, 8 aa, synthetic construct
VSSLYLYY

SEQ ID NO: 31698 - protein, 9 aa, synthetic construct
GAVSNVKVI

SEQ ID NO: 31699 - protein, 8 aa, synthetic construct
FTFVYTLL

SEQ ID NO: 31700 - protein, 8 aa, synthetic construct
RASSVHNI

SEQ ID NO: 31701 - protein, 9 aa, synthetic construct
YTLLDHWVF

SEQ ID NO: 31702 - protein, 9 aa, synthetic construct
ASRGPAYGL

SEQ ID NO: 31703 - protein, 9 aa, synthetic construct
SASGLQKHI

SEQ ID NO: 31704 - protein, 9 aa, synthetic construct
KAFRSASGL

SEQ ID NO: 31705 - protein, 15 aa, synthetic construct
RGRHLVLLVTAQAAA

SEQ ID NO: 31706 - protein, 15 aa, synthetic construct
PRFLWQPTRECHFFN

SEQ ID NO: 31707 - protein, 15 aa, synthetic construct
KAFRSASGLQKHIRT

SEQ ID NO: 31708 - protein, 15 aa, synthetic construct
LISALHYLVPVRPRR

SEQ ID NO: 31709 - protein, 15 aa, synthetic construct
GNFDGIQNNDLTSRN

SEQ ID NO: 31710 - protein, 15 aa, synthetic construct
VQEIEVIGGYLALQK

SEQ ID NO: 31711 - protein, 15 aa, synthetic construct
DSLLAEGGGLGGGDV

SEQ ID NO: 31712 - protein, 15 aa, synthetic construct
KGSKLKILGPFSNFF

SEQ ID NO: 31713 - protein, 15 aa, synthetic construct
QCGKAFRSASGLQKH

SEQ ID NO: 31714 - protein, 15 aa, synthetic construct
EGKFQNPYAHSLISA

SEQ ID NO: 31715 - protein, 15 aa, synthetic construct
SLISALHYLVPVRPR

SEQ ID NO: 31716 - protein, 15 aa, synthetic construct
GPFGAVSNVKVIRDF

SEQ ID NO: 31717 - protein, 15 aa, synthetic construct
LKKEWEALCAYQAEP

SEQ ID NO: 31718 - protein, 15 aa, synthetic construct
RPRFLWQPTRECHFF

SEQ ID NO: 31719 - protein, 15 aa, synthetic construct
GRHLVLLVTAQAAAA

SEQ ID NO: 31720 - protein, 15 aa, synthetic construct
GQKLFIPQINTKHSG

SEQ ID NO: 31721 - protein, 15 aa, synthetic construct
ESVLWQLFGPFGAVS

SEQ ID NO: 31722 - protein, 15 aa, synthetic construct
HLVLLVTAQAAAAGH

SEQ ID NO: 31723 - protein, 15 aa, synthetic construct
LRSYSAGEASDVSRN

SEQ ID NO: 31724 - protein, 15 aa, synthetic construct
RVITVLRNRQVTLEC

SEQ ID NO: 31725 - protein, 15 aa, synthetic construct
QTSTFTISQSVLVTN

SEQ ID NO: 31726 - protein, 15 aa, synthetic construct
RHLVLLVTAQAAAAG

SEQ ID NO: 31727 - protein, 15 aa, synthetic construct
QKLFIPQINTKHSGL

SEQ ID NO: 31728 - protein, 15 aa, synthetic construct
EVYFTALFPYVVLLI

SEQ ID NO: 31729 - protein, 15 aa, synthetic construct
CGKAFRSASGLQKHI

SEQ ID NO: 31730 - protein, 15 aa, synthetic construct
LQRLRSYSAGEASDV

SEQ ID NO: 31731 - protein, 15 aa, synthetic construct
HLQRLRSYSAGEASD

SEQ ID NO: 31732 - protein, 15 aa, synthetic construct
KISERYGPMFTIHLG

SEQ ID NO: 31733 - protein, 15 aa, synthetic construct
RASQVECTGAHIVAV

SEQ ID NO: 31734 - protein, 15 aa, synthetic construct
MDSLLAEGGGLGGGD

SEQ ID NO: 31735 - protein, 15 aa, synthetic construct
SSVHNIEGFGVHPKN

SEQ ID NO: 31736 - protein, 15 aa, synthetic construct
SVLWQLFGPFGAVSN

SEQ ID NO: 31737 - protein, 15 aa, synthetic construct
LFGPFGAVSNVKVIR

SEQ ID NO: 31738 - protein, 15 aa, synthetic construct
TVQEIEVIGGYLALQ

SEQ ID NO: 31739 - protein, 15 aa, synthetic construct
RRASSVHNIEGFGVH

SEQ ID NO: 31740 - protein, 15 aa, synthetic construct
SMDSLLAEGGGLGGG

SEQ ID NO: 31741 - protein, 15 aa, synthetic construct
ERYGPMFTIHLGPRR

SEQ ID NO: 31742 - protein, 15 aa, synthetic construct
SERYGPMFTIHLGPR

SEQ ID NO: 31743 - protein, 15 aa, synthetic construct
RSYSAGEASDVSRNR

SEQ ID NO: 31744 - protein, 15 aa, synthetic construct
DEPRVITVLRNRQVT

SEQ ID NO: 31745 - protein, 15 aa, synthetic construct
TRPRFLWQPTRECHF

SEQ ID NO: 31746 - protein, 15 aa, synthetic construct
ISERYGPMFTIHLGP

SEQ ID NO: 31747 - protein, 15 aa, synthetic construct
VLLVTAQAAAAGHRL

SEQ ID NO: 31748 - protein, 15 aa, synthetic construct
TQTSTFTISQSVLVT

SEQ ID NO: 31749 - protein, 15 aa, synthetic construct
SGKEVYFTALFPYVV

SEQ ID NO: 31750 - protein, 15 aa, synthetic construct
PFGAVSNVKVIRDFT

SEQ ID NO: 31751 - protein, 15 aa, synthetic construct
CGNFDGIQNNDLTSR

SEQ ID NO: 31752 - protein, 15 aa, synthetic construct
RLRSYSAGEASDVSR

SEQ ID NO: 31753 - protein, 15 aa, synthetic construct
LVLLVTAQAAAAGHR

SEQ ID NO: 31754 - protein, 15 aa, synthetic construct
RASSVHNIEGFGVHP

SEQ ID NO: 31755 - protein, 15 aa, synthetic construct
ASSVHNIEGFGVHPK

SEQ ID NO: 31756 - protein, 15 aa, synthetic construct
PTVQEIEVIGGYLAL

SEQ ID NO: 31757 - protein, 15 aa, synthetic construct
QEIEVIGGYLALQKS

SEQ ID NO: 31758 - protein, 15 aa, synthetic construct
EPRVITVLRNRQVTL

SEQ ID NO: 31759 - protein, 15 aa, synthetic construct
STFTISQSVLVTNLK

SEQ ID NO: 31760 - protein, 15 aa, synthetic construct
QLFGPFGAVSNVKVI

SEQ ID NO: 31761 - protein, 15 aa, synthetic construct
GKAFRSASGLQKHIR

SEQ ID NO: 31762 - protein, 15 aa, synthetic construct
ASQVECTGAHIVAVP

SEQ ID NO: 31763 - protein, 15 aa, synthetic construct
TSTFTISQSVLVTNL

SEQ ID NO: 31764 - protein, 15 aa, synthetic construct
PRVITVLRNRQVTLE

SEQ ID NO: 31765 - protein, 15 aa, synthetic construct
RYGPMFTIHLGPRRV

SEQ ID NO: 31766 - protein, 15 aa, synthetic construct
NRLKKEWEALCAYQA

SEQ ID NO: 31767 - protein, 15 aa, synthetic construct
DTRPRFLWQPTRECH

SEQ ID NO: 31768 - protein, 15 aa, synthetic construct
FGPFGAVSNVKVIRD

SEQ ID NO: 31769 - protein, 15 aa, synthetic construct
VRGRHLVLLVTAQAA

SEQ ID NO: 31770 - protein, 15 aa, synthetic construct
KKEWEALCAYQAEPN

SEQ ID NO: 31771 - protein, 15 aa, synthetic construct
GKEVYFTALFPYVVL

SEQ ID NO: 31772 - protein, 15 aa, synthetic construct
QRLRSYSAGEASDVS

SEQ ID NO: 31773 - protein, 15 aa, synthetic construct
ISALHYLVPVRPRRQ

SEQ ID NO: 31774 - protein, 15 aa, synthetic construct
RLKKEWEALCAYQAE

SEQ ID NO: 31775 - protein, 15 aa, synthetic construct
KEVYFTALFPYVVLL

SEQ ID NO: 31776 - protein, 15 aa, synthetic construct
SASGLQKHIRTHTGE

SEQ ID NO: 31777 - protein, 15 aa, synthetic construct
ALFKGIKSSGKEVYF

SEQ ID NO: 31778 - protein, 15 aa, synthetic construct
KGIKSSGKEVYFTAL

SEQ ID NO: 31779 - protein, 15 aa, synthetic construct
FKGIKSSGKEVYFTA

SEQ ID NO: 31780 - protein, 15 aa, synthetic construct
MEDHLKNKNRLKKEW

SEQ ID NO: 31781 - protein, 15 aa, synthetic construct
NIEGFGVHPKNIFRD

SEQ ID NO: 31782 - protein, 15 aa, synthetic construct
VEALRFVKRHCKRCI

SEQ ID NO: 31783 - protein, 15 aa, synthetic construct
HNIEGFGVHPKNIFR

SEQ ID NO: 31784 - protein, 15 aa, synthetic construct
IPQINTKHSGLYACS

SEQ ID NO: 31785 - protein, 15 aa, synthetic construct
PMFTIHLGPRRVVVL

SEQ ID NO: 31786 - protein, 15 aa, synthetic construct
GKAFILSSTLSKHKG

SEQ ID NO: 31787 - protein, 15 aa, synthetic construct
DTRPRFLWHPKRECH

SEQ ID NO: 31788 - protein, 15 aa, synthetic construct
SNVKVIRDFTTNKCK

SEQ ID NO: 31789 - protein, 15 aa, synthetic construct
PPPIGMASRGPAYGL

SEQ ID NO: 31790 - protein, 15 aa, synthetic construct
HYTLIVKVSDGKFYS

SEQ ID NO: 31791 - protein, 15 aa, synthetic construct
LFKGIKSSGKEVYFT

SEQ ID NO: 31792 - protein, 15 aa, synthetic construct
LFIPQINTKHSGLYA

SEQ ID NO: 31793 - protein, 15 aa, synthetic construct
YMEDHLKNKNRLKKE

SEQ ID NO: 31794 - protein, 15 aa, synthetic construct
SKDHYTLIVKVSDGK

SEQ ID NO: 31795 - protein, 15 aa, synthetic construct
FIPQINTKHSGLYAC

SEQ ID NO: 31796 - protein, 15 aa, synthetic construct
SYMEDHLKNKNRLKK

SEQ ID NO: 31797 - protein, 15 aa, synthetic construct
PQINTKHSGLYACSV

SEQ ID NO: 31798 - protein, 15 aa, synthetic construct
RPRFLWHPKRECHFF

SEQ ID NO: 31799 - protein, 15 aa, synthetic construct
SGLQKHIRTHTGEKP

SEQ ID NO: 31800 - protein, 15 aa, synthetic construct
ASGLQKHIRTHTGEK

SEQ ID NO: 31801 - protein, 15 aa, synthetic construct
AVSNVKVIRDFTTNK

SEQ ID NO: 31802 - protein, 15 aa, synthetic construct
TRPRFLWHPKRECHF

SEQ ID NO: 31803 - protein, 15 aa, synthetic construct
EDHLKNKNRLKKEWE

SEQ ID NO: 31804 - protein, 15 aa, synthetic construct
DHLKNKNRLKKEWEA

SEQ ID NO: 31805 - protein, 15 aa, synthetic construct
VHNIEGFGVHPKNIF

SEQ ID NO: 31806 - protein, 15 aa, synthetic construct
KDHYTLIVKVSDGKF

SEQ ID NO: 31807 - protein, 15 aa, synthetic construct
PPPPIGMASRGPAYG

SEQ ID NO: 31808 - protein, 15 aa, synthetic construct
SVHNIEGFGVHPKNI

SEQ ID NO: 31809 - protein, 15 aa, synthetic construct
GPMFTIHLGPRRVVV

SEQ ID NO: 31810 - protein, 15 aa, synthetic construct
QPPPPIGMASRGPAY

SEQ ID NO: 31811 - protein, 15 aa, synthetic construct
TDEPRVITVLRNRQV

SEQ ID NO: 31812 - protein, 15 aa, synthetic construct
YGPMFTIHLGPRRVV

SEQ ID NO: 31813 - protein, 15 aa, synthetic construct
CVSSLYLYYDPDYSF

SEQ ID NO: 31814 - protein, 15 aa, synthetic construct
SSLYLYYDPDYSFLS

SEQ ID NO: 31815 - protein, 15 aa, synthetic construct
SLYLYYDPDYSFLSL

SEQ ID NO: 31816 - protein, 15 aa, synthetic construct
PNCVSSLYLYYDPDY

SEQ ID NO: 31817 - protein, 15 aa, synthetic construct
RDFHFSMDSLLAEGG

SEQ ID NO: 31818 - protein, 15 aa, synthetic construct
NCVSSLYLYYDPDYS

SEQ ID NO: 31819 - protein, 15 aa, synthetic construct
VSNVKVIRDFTTNKC

SEQ ID NO: 31820 - protein, 15 aa, synthetic construct
MDNDIVQGAEDQGTQ

SEQ ID NO: 31821 - protein, 15 aa, synthetic construct
DGKSNVAFMSYFLQG

SEQ ID NO: 31822 - protein, 15 aa, synthetic construct
LPNCVSSLYLYYDPD

SEQ ID NO: 31823 - protein, 15 aa, synthetic construct
SSGDYEILYWDVAGG

SEQ ID NO: 31824 - protein, 15 aa, synthetic construct
GAVSNVKVIRDFTTN

SEQ ID NO: 31825 - protein, 15 aa, synthetic construct
TSRNLQVEEDPVDFG

SEQ ID NO: 31826 - protein, 15 aa, synthetic construct
KSNVAFMSYFLQGKV

SEQ ID NO: 31827 - protein, 15 aa, synthetic construct
GKSNVAFMSYFLQGK

SEQ ID NO: 31828 - protein, 15 aa, synthetic construct
DNDIVQGAEDQGTQG

SEQ ID NO: 31829 - protein, 15 aa, synthetic construct
PFTFVYTLLDHWVFG

SEQ ID NO: 31830 - protein, 15 aa, synthetic construct
SRNLQVEEDPVDFGN

SEQ ID NO: 31831 - protein, 15 aa, synthetic construct
VSSLYLYYDPDYSFL

SEQ ID NO: 31832 - protein, 15 aa, synthetic construct
TFVYTLLDHWVFGEA

SEQ ID NO: 31833 - protein, 15 aa, synthetic construct
NDIVQGAEDQGTQGE

SEQ ID NO: 31834 - protein, 15 aa, synthetic construct
FTFVYTLLDHWVFGE

SEQ ID NO: 31835 - protein, 15 aa, synthetic construct
TIKNNNLSKDHYTLI

SEQ ID NO: 31836 - protein, 15 aa, synthetic construct
LSKDHYTLIVKVSDG

SEQ ID NO: 31837 - protein, 15 aa, synthetic construct
LIKNTQTSTFTISQS

SEQ ID NO: 31838 - protein, 15 aa, synthetic construct
DLTSRNLQVEEDPVD

SEQ ID NO: 31839 - protein, 15 aa, synthetic construct
LTIKNNNLSKDHYTL

SEQ ID NO: 31840 - protein, 15 aa, synthetic construct
LAQLEHSEPTEAEPE

SEQ ID NO: 31841 - protein, 15 aa, synthetic construct
IKNTQTSTFTISQSV

SEQ ID NO: 31842 - protein, 15 aa, synthetic construct
AQLEHSEPTEAEPEA

SEQ ID NO: 31843 - protein, 15 aa, synthetic construct
KNNNLSKDHYTLIVK

SEQ ID NO: 31844 - protein, 15 aa, synthetic construct
HVPPNIAGTDEPRVI

SEQ ID NO: 31845 - protein, 15 aa, synthetic construct
LTSRNLQVEEDPVDF

SEQ ID NO: 31846 - protein, 15 aa, synthetic construct
KNTQTSTFTISQSVL

SEQ ID NO: 31847 - protein, 15 aa, synthetic construct
IVQGAEDQGTQGEEG

SEQ ID NO: 31848 - protein, 15 aa, synthetic construct
DIVQGAEDQGTQGEE

SEQ ID NO: 31849 - protein, 15 aa, synthetic construct
PPNIAGTDEPRVITV

SEQ ID NO: 31850 - protein, 15 aa, synthetic construct
SIRRASSVHNIEGFG

SEQ ID NO: 31851 - protein, 15 aa, synthetic construct
AMDNDIVQGAEDQGT

SEQ ID NO: 31852 - protein, 15 aa, synthetic construct
VLTIKNNNLSKDHYT

SEQ ID NO: 31853 - protein, 15 aa, synthetic construct
IKNNNLSKDHYTLIV

SEQ ID NO: 31854 - protein, 15 aa, synthetic construct
IRRASSVHNIEGFGV

SEQ ID NO: 31855 - protein, 15 aa, synthetic construct
GAEDQGTQGEEGAYE

SEQ ID NO: 31856 - protein, 15 aa, synthetic construct
NGNFNNSYSLHKGDC

SEQ ID NO: 31857 - protein, 15 aa, synthetic construct
VPPNIAGTDEPRVIT

SEQ ID NO: 31858 - protein, 15 aa, synthetic construct
GNFNNSYSLHKGDCN

SEQ ID NO: 31859 - protein, 15 aa, synthetic construct
FGAVSNVKVIRDFTT

SEQ ID NO: 31860 - protein, 15 aa, synthetic construct
AGGSGSASSNSSGDA

SEQ ID NO: 31861 - protein, 15 aa, synthetic construct
QVECTGAHIVAVPTP

SEQ ID NO: 31862 - protein, 15 aa, synthetic construct
DVSRNRGASLLARPG

SEQ ID NO: 31863 - protein, 15 aa, synthetic construct
AAGGSGSASSNSSGD

SEQ ID NO: 31864 - protein, 15 aa, synthetic construct
CSIRRASSVHNIEGF

SEQ ID NO: 31865 - protein, 15 aa, synthetic construct
GAHIVAVPTPLPWNA

SEQ ID NO: 31866 - protein, 9 aa, synthetic construct
TTFSWATAM

SEQ ID NO: 31867 - protein, 10 aa, synthetic construct
HTTFSWATAM

SEQ ID NO: 31868 - protein, 9 aa, synthetic construct
CTAANHTTF

SEQ ID NO: 31869 - protein, 10 aa, synthetic construct
FCTAANHTTF

SEQ ID NO: 31870 - protein, 9 aa, synthetic construct
GDKKGQSPF

SEQ ID NO: 31871 - protein, 11 aa, synthetic construct
QEGDKKGQSPF

SEQ ID NO: 31872 - protein, 9 aa, synthetic construct
AANHTTFSW

SEQ ID NO: 31873 - protein, 9 aa, synthetic construct
SESLQACKL

SEQ ID NO: 31874 - protein, 8 aa, synthetic construct
TAANHTTF

SEQ ID NO: 31875 - protein, 15 aa, synthetic construct
MEEVGIYRVSGRCGH

SEQ ID NO: 31876 - protein, 15 aa, synthetic construct
EEVGIYRVSGRCGHG

SEQ ID NO: 31877 - protein, 15 aa, synthetic construct
GMEEVGIYRVSGRCG

SEQ ID NO: 31878 - protein, 15 aa, synthetic construct
ANHTTFSWATAMAPT

SEQ ID NO: 31879 - protein, 15 aa, synthetic construct
NHTTFSWATAMAPTG

SEQ ID NO: 31880 - protein, 15 aa, synthetic construct
AANHTTFSWATAMAP

SEQ ID NO: 31881 - protein, 15 aa, synthetic construct
RRGMEEVGIYRVSGR

SEQ ID NO: 31882 - protein, 15 aa, synthetic construct
ADRLRDPDSHIVKKN

SEQ ID NO: 31883 - protein, 15 aa, synthetic construct
SESLQACKLAQANGW

SEQ ID NO: 31884 - protein, 15 aa, synthetic construct
GSESLQACKLAQANG

SEQ ID NO: 31885 - protein, 15 aa, synthetic construct
LKVNQIGSESLQACK

SEQ ID NO: 31886 - protein, 9 aa, synthetic construct
NINEYKMHK

SEQ ID NO: 31887 - protein, 10 aa, synthetic construct
ILSPGYLDSY

SEQ ID NO: 31888 - protein, 10 aa, synthetic construct
GALRNMAVVK

SEQ ID NO: 31889 - protein, 11 aa, synthetic construct
HLVTESQSLNK

SEQ ID NO: 31890 - protein, 10 aa, synthetic construct
SLGRAQCQRK

SEQ ID NO: 31891 - protein, 9 aa, synthetic construct
VLSGGTTTY

SEQ ID NO: 31892 - protein, 11 aa, synthetic construct
GTTTYPGIADR

SEQ ID NO: 31893 - protein, 10 aa, synthetic construct
LSGYPPFMGH

SEQ ID NO: 31894 - protein, 10 aa, synthetic construct
KFTQFVHLKR

SEQ ID NO: 31895 - protein, 11 aa, synthetic construct
ASYDSGLEVRR

SEQ ID NO: 31896 - protein, 11 aa, synthetic construct
VVKHNLNIMIK

SEQ ID NO: 31897 - protein, 10 aa, synthetic construct
LSGRPQLPGK

SEQ ID NO: 31898 - protein, 9 aa, synthetic construct
SVIPTPHHY

SEQ ID NO: 31899 - protein, 11 aa, synthetic construct
QLSGRPQLPGK

SEQ ID NO: 31900 - protein, 9 aa, synthetic construct
GVCLEPVIK

SEQ ID NO: 31901 - protein, 11 aa, synthetic construct
VADTAQRIVSK

SEQ ID NO: 31902 - protein, 10 aa, synthetic construct
YAIKYVNLEK

SEQ ID NO: 31903 - protein, 9 aa, synthetic construct
VTESQSLNK

SEQ ID NO: 31904 - protein, 9 aa, synthetic construct
ALRNIAVAK

SEQ ID NO: 31905 - protein, 11 aa, synthetic construct
RAQCQRKGILK

SEQ ID NO: 31906 - protein, 11 aa, synthetic construct
QGALRNIAVAK

SEQ ID NO: 31907 - protein, 11 aa, synthetic construct
SLAPLLLHPPR

SEQ ID NO: 31908 - protein, 10 aa, synthetic construct
TNINEYKMHK

SEQ ID NO: 31909 - protein, 9 aa, synthetic construct
AIKYVNLEK

SEQ ID NO: 31910 - protein, 10 aa, synthetic construct
ALRNMAVVKH

SEQ ID NO: 31911 - protein, 10 aa, synthetic construct
TTTYPGIADR

SEQ ID NO: 31912 - protein, 11 aa, synthetic construct
AMYRAMGQSHK

SEQ ID NO: 31913 - protein, 10 aa, synthetic construct
AMYRAMGQSH

SEQ ID NO: 31914 - protein, 11 aa, synthetic construct
MLSGYPPFMGH

SEQ ID NO: 31915 - protein, 9 aa, synthetic construct
KMHKEVASK

SEQ ID NO: 31916 - protein, 10 aa, synthetic construct
GALRNMAVPK

SEQ ID NO: 31917 - protein, 9 aa, synthetic construct
TTYPGIADR

SEQ ID NO: 31918 - protein, 10 aa, synthetic construct
KMHKEVASKY

SEQ ID NO: 31919 - protein, 11 aa, synthetic construct
VVYKSQMEDQK

SEQ ID NO: 31920 - protein, 9 aa, synthetic construct
NNYRTLLEK

SEQ ID NO: 31921 - protein, 10 aa, synthetic construct
YKMHKEVASK

SEQ ID NO: 31922 - protein, 11 aa, synthetic construct
LVTESQSLNKK

SEQ ID NO: 31923 - protein, 10 aa, synthetic construct
LVTESQSLNK

SEQ ID NO: 31924 - protein, 10 aa, synthetic construct
GALRNIAVAK

SEQ ID NO: 31925 - protein, 9 aa, synthetic construct
SGRPQLPGK

SEQ ID NO: 31926 - protein, 10 aa, synthetic construct
AQCQRKGILK

SEQ ID NO: 31927 - protein, 10 aa, synthetic construct
GALTNMAVAK

SEQ ID NO: 31928 - protein, 11 aa, synthetic construct
LLHPPRVTPPR

SEQ ID NO: 31929 - protein, 10 aa, synthetic construct
ALRNIAVAKH

SEQ ID NO: 31930 - protein, 9 aa, synthetic construct
ALRNMAVVK

SEQ ID NO: 31931 - protein, 10 aa, synthetic construct
VTESQSLNKK

SEQ ID NO: 31932 - protein, 9 aa, synthetic construct
ALRNMAVPK

SEQ ID NO: 31933 - protein, 10 aa, synthetic construct
TQFVHLKRHK

SEQ ID NO: 31934 - protein, 10 aa, synthetic construct
KSQMEDQKYK

SEQ ID NO: 31935 - protein, 10 aa, synthetic construct
VLNGSQLSAR

SEQ ID NO: 31936 - protein, 9 aa, synthetic construct
VLNEKKHIY

SEQ ID NO: 31937 - protein, 9 aa, synthetic construct
SGYPPFMGH

SEQ ID NO: 31938 - protein, 9 aa, synthetic construct
DTAQRIVSK

SEQ ID NO: 31939 - protein, 9 aa, synthetic construct
ALTNMAVAK

SEQ ID NO: 31940 - protein, 11 aa, synthetic construct
KVFQVLNEKKH

SEQ ID NO: 31941 - protein, 9 aa, synthetic construct
SQMEDQKYK

SEQ ID NO: 31942 - protein, 10 aa, synthetic construct
ASYDSGLEVR

SEQ ID NO: 31943 - protein, 11 aa, synthetic construct
ATLPEFVVYKS

SEQ ID NO: 31944 - protein, 11 aa, synthetic construct
SLNKKRDATTK

SEQ ID NO: 31945 - protein, 9 aa, synthetic construct
ASPEGAHCK

SEQ ID NO: 31946 - protein, 10 aa, synthetic construct
ADTAQRIVSK

SEQ ID NO: 31947 - protein, 9 aa, synthetic construct
HAVQLLILL

SEQ ID NO: 31948 - protein, 11 aa, synthetic construct
NIISTVQQGAF

SEQ ID NO: 31949 - protein, 10 aa, synthetic construct
QVLNEKKHIY

SEQ ID NO: 31950 - protein, 9 aa, synthetic construct
EEKVIQVLY

SEQ ID NO: 31951 - protein, 9 aa, synthetic construct
STVQQGAFL

SEQ ID NO: 31952 - protein, 10 aa, synthetic construct
STPNGRDLLF

SEQ ID NO: 31953 - protein, 10 aa, synthetic construct
NVLSGGTTTY

SEQ ID NO: 31954 - protein, 9 aa, synthetic construct
TAQRIVSKY

SEQ ID NO: 31955 - protein, 9 aa, synthetic construct
NNSPLVPTF

SEQ ID NO: 31956 - protein, 11 aa, synthetic construct
MLTDPYGSQAW

SEQ ID NO: 31957 - protein, 9 aa, synthetic construct
WAFIPEASY

SEQ ID NO: 31958 - protein, 11 aa, synthetic construct
SVIPTPHHYLL

SEQ ID NO: 31959 - protein, 9 aa, synthetic construct
ETPDNQVSA

SEQ ID NO: 31960 - protein, 10 aa, synthetic construct
HAVQLLILLY

SEQ ID NO: 31961 - protein, 10 aa, synthetic construct
SVIPTPHHYL

SEQ ID NO: 31962 - protein, 9 aa, synthetic construct
LSPGYLDSY

SEQ ID NO: 31963 - protein, 9 aa, synthetic construct
MHKEVASKY

SEQ ID NO: 31964 - protein, 11 aa, synthetic construct
VPSVIPTPHHY

SEQ ID NO: 31965 - protein, 9 aa, synthetic construct
TPKENHNNY

SEQ ID NO: 31966 - protein, 9 aa, synthetic construct
AAVLQYLYY

SEQ ID NO: 31967 - protein, 9 aa, synthetic construct
EIVELQQCW

SEQ ID NO: 31968 - protein, 10 aa, synthetic construct
PSVIPTPHHY

SEQ ID NO: 31969 - protein, 10 aa, synthetic construct
LTDPYGSQAW

SEQ ID NO: 31970 - protein, 10 aa, synthetic construct
DTAQRIVSKY

SEQ ID NO: 31971 - protein, 10 aa, synthetic construct
DVLVLNGSQL

SEQ ID NO: 31972 - protein, 10 aa, synthetic construct
HAAEEASSEY

SEQ ID NO: 31973 - protein, 10 aa, synthetic construct
QEIVELQQCW

SEQ ID NO: 31974 - protein, 10 aa, synthetic construct
NIALELQAYF

SEQ ID NO: 31975 - protein, 9 aa, synthetic construct
SVADTAQRI

SEQ ID NO: 31976 - protein, 10 aa, synthetic construct
TTYPGIADRM

SEQ ID NO: 31977 - protein, 10 aa, synthetic construct
ETPKENHNNY

SEQ ID NO: 31978 - protein, 10 aa, synthetic construct
EANNQTLDSY

SEQ ID NO: 31979 - protein, 11 aa, synthetic construct
YRWAFIPEASY

SEQ ID NO: 31980 - protein, 9 aa, synthetic construct
TPNGRDLLF

SEQ ID NO: 31981 - protein, 9 aa, synthetic construct
AAEEASSEY

SEQ ID NO: 31982 - protein, 9 aa, synthetic construct
NIALELQAY

SEQ ID NO: 31983 - protein, 10 aa, synthetic construct
EIKNKINGNW

SEQ ID NO: 31984 - protein, 11 aa, synthetic construct
WLGVRGGLVLY

SEQ ID NO: 31985 - protein, 10 aa, synthetic construct
LLFGFDPLAF

SEQ ID NO: 31986 - protein, 9 aa, synthetic construct
KSQMEDQKY

SEQ ID NO: 31987 - protein, 11 aa, synthetic construct
NNVLSGGTTTY

SEQ ID NO: 31988 - protein, 10 aa, synthetic construct
GNIALELQAY

SEQ ID NO: 31989 - protein, 11 aa, synthetic construct
AGNIALELQAY

SEQ ID NO: 31990 - protein, 9 aa, synthetic construct
VQQGAFLGL

SEQ ID NO: 31991 - protein, 9 aa, synthetic construct
VIMGSRAVM

SEQ ID NO: 31992 - protein, 10 aa, synthetic construct
WQHRPGAAGL

SEQ ID NO: 31993 - protein, 10 aa, synthetic construct
VQSGSGHRQL

SEQ ID NO: 31994 - protein, 10 aa, synthetic construct
IISTVQQGAF

SEQ ID NO: 31995 - protein, 11 aa, synthetic construct
IMGSRAVMDAY

SEQ ID NO: 31996 - protein, 9 aa, synthetic construct
MEHDQHVTH

SEQ ID NO: 31997 - protein, 9 aa, synthetic construct
ANNQTLDSY

SEQ ID NO: 31998 - protein, 9 aa, synthetic construct
NQVSAEVQF

SEQ ID NO: 31999 - protein, 9 aa, synthetic construct
GSRAVMDAY

SEQ ID NO: 32000 - protein, 9 aa, synthetic construct
KAAVLQYLY

SEQ ID NO: 32001 - protein, 11 aa, synthetic construct
YKMHKEVASKY

SEQ ID NO: 32002 - protein, 10 aa, synthetic construct
RWAFIPEASY

SEQ ID NO: 32003 - protein, 9 aa, synthetic construct
TQFVHLKRH

SEQ ID NO: 32004 - protein, 9 aa, synthetic construct
RQTQPPGAL

SEQ ID NO: 32005 - protein, 9 aa, synthetic construct
KQLAGNIAL

SEQ ID NO: 32006 - protein, 9 aa, synthetic construct
VVKHNLNIM

SEQ ID NO: 32007 - protein, 10 aa, synthetic construct
VLSGGTTTYP

SEQ ID NO: 32008 - protein, 9 aa, synthetic construct
LRKAAVLQY

SEQ ID NO: 32009 - protein, 10 aa, synthetic construct
LLRKAAVLQY

SEQ ID NO: 32010 - protein, 9 aa, synthetic construct
VLYHAVQLL

SEQ ID NO: 32011 - protein, 11 aa, synthetic construct
VILSPGYLDSY

SEQ ID NO: 32012 - protein, 11 aa, synthetic construct
LLLRKAAVLQY

SEQ ID NO: 32013 - protein, 10 aa, synthetic construct
KADNQTLDSY

SEQ ID NO: 32014 - protein, 11 aa, synthetic construct
FQVLNEKKHIY

SEQ ID NO: 32015 - protein, 8 aa, synthetic construct
SQMEDQKY

SEQ ID NO: 32016 - protein, 9 aa, synthetic construct
VQLSGRPQL

SEQ ID NO: 32017 - protein, 10 aa, synthetic construct
AKQLAGNIAL

SEQ ID NO: 32018 - protein, 8 aa, synthetic construct
AQRIVSKY

SEQ ID NO: 32019 - protein, 11 aa, synthetic construct
APPGIPGQASL

SEQ ID NO: 32020 - protein, 11 aa, synthetic construct
NHAAEEASSEY

SEQ ID NO: 32021 - protein, 9 aa, synthetic construct
VPSVIPTPH

SEQ ID NO: 32022 - protein, 11 aa, synthetic construct
AETPKENHNNY

SEQ ID NO: 32023 - protein, 8 aa, synthetic construct
SPGYLDSY

SEQ ID NO: 32024 - protein, 11 aa, synthetic construct
TPNGRDLLFGF

SEQ ID NO: 32025 - protein, 8 aa, synthetic construct
AAVLQYLY

SEQ ID NO: 32026 - protein, 9 aa, synthetic construct
DPYGSQAWL

SEQ ID NO: 32027 - protein, 8 aa, synthetic construct
DPYGSQAW

SEQ ID NO: 32028 - protein, 9 aa, synthetic construct
SCRLEEEEY

SEQ ID NO: 32029 - protein, 11 aa, synthetic construct
IPVSSASSSTL

SEQ ID NO: 32030 - protein, 8 aa, synthetic construct
EPMESYFL

SEQ ID NO: 32031 - protein, 11 aa, synthetic construct
GPFEEKVIQVL

SEQ ID NO: 32032 - protein, 9 aa, synthetic construct
TAAAATPAA

SEQ ID NO: 32033 - protein, 9 aa, synthetic construct
VPKHNLNIM

SEQ ID NO: 32034 - protein, 11 aa, synthetic construct
LPEFVVYKSQM

SEQ ID NO: 32035 - protein, 8 aa, synthetic construct
YLDSYPNL

SEQ ID NO: 32036 - protein, 8 aa, synthetic construct
IAVAKHNL

SEQ ID NO: 32037 - protein, 9 aa, synthetic construct
WVQAMYRAM

SEQ ID NO: 32038 - protein, 9 aa, synthetic construct
QSGSGHRQL

SEQ ID NO: 32039 - protein, 8 aa, synthetic construct
SSASSSTL

SEQ ID NO: 32040 - protein, 9 aa, synthetic construct
VSSASSSTL

SEQ ID NO: 32041 - protein, 11 aa, synthetic construct
MAVPKHNLNIM

SEQ ID NO: 32042 - protein, 9 aa, synthetic construct
LVIMGSRAV

SEQ ID NO: 32043 - protein, 9 aa, synthetic construct
LAGNIALEL

SEQ ID NO: 32044 - protein, 8 aa, synthetic construct
QTQPPGAL

SEQ ID NO: 32045 - protein, 10 aa, synthetic construct
YLDSYPNLQM

SEQ ID NO: 32046 - protein, 9 aa, synthetic construct
ASYDSGLEV

SEQ ID NO: 32047 - protein, 9 aa, synthetic construct
NMAVPKHNL

SEQ ID NO: 32048 - protein, 8 aa, synthetic construct
HAVQLLIL

SEQ ID NO: 32049 - protein, 8 aa, synthetic construct
LVLNGSQL

SEQ ID NO: 32050 - protein, 8 aa, synthetic construct
KAAVLQYL

SEQ ID NO: 32051 - protein, 8 aa, synthetic construct
MAVPKHNL

SEQ ID NO: 32052 - protein, 10 aa, synthetic construct
FVQLSGRPQL

SEQ ID NO: 32053 - protein, 9 aa, synthetic construct
MLSGYPPFM

SEQ ID NO: 32054 - protein, 8 aa, synthetic construct
VLYHAVQL

SEQ ID NO: 32055 - protein, 9 aa, synthetic construct
VADTAQRIV

SEQ ID NO: 32056 - protein, 9 aa, synthetic construct
STPNGRDLL

SEQ ID NO: 32057 - protein, 9 aa, synthetic construct
FQDYFGVCL

SEQ ID NO: 32058 - protein, 9 aa, synthetic construct
GVLYHAVQL

SEQ ID NO: 32059 - protein, 8 aa, synthetic construct
FVVYKSQM

SEQ ID NO: 32060 - protein, 9 aa, synthetic construct
VLVLNGSQL

SEQ ID NO: 32061 - protein, 9 aa, synthetic construct
ISTVQQGAF

SEQ ID NO: 32062 - protein, 9 aa, synthetic construct
VVLGNNIDL

SEQ ID NO: 32063 - protein, 11 aa, synthetic construct
GFDPQGALRNI

SEQ ID NO: 32064 - protein, 10 aa, synthetic construct
HYEPMESYFL

SEQ ID NO: 32065 - protein, 9 aa, synthetic construct
TYPGIADRM

SEQ ID NO: 32066 - protein, 9 aa, synthetic construct
NHNNYRTLL

SEQ ID NO: 32067 - protein, 9 aa, synthetic construct
SSDDCGKQI

SEQ ID NO: 32068 - protein, 8 aa, synthetic construct
SYDSGLEV

SEQ ID NO: 32069 - protein, 9 aa, synthetic construct
FEEKVIQVL

SEQ ID NO: 32070 - protein, 8 aa, synthetic construct
LYDPCRSA

SEQ ID NO: 32071 - protein, 9 aa, synthetic construct
LFGFDPLAF

SEQ ID NO: 32072 - protein, 8 aa, synthetic construct
LRDERELL

SEQ ID NO: 32073 - protein, 9 aa, synthetic construct
NIDLENRQV

SEQ ID NO: 32074 - protein, 10 aa, synthetic construct
LYDPCRSADI

SEQ ID NO: 32075 - protein, 9 aa, synthetic construct
YHAVQLLIL

SEQ ID NO: 32076 - protein, 9 aa, synthetic construct
TGDSGPPPV

SEQ ID NO: 32077 - protein, 9 aa, synthetic construct
GYLDSYPNL

SEQ ID NO: 32078 - protein, 8 aa, synthetic construct
VADTAQRI

SEQ ID NO: 32079 - protein, 9 aa, synthetic construct
RRPECGWGL

SEQ ID NO: 32080 - protein, 10 aa, synthetic construct
TFQDYFGVCL

SEQ ID NO: 32081 - protein, 9 aa, synthetic construct
SPEGAHCKV

SEQ ID NO: 32082 - protein, 15 aa, synthetic construct
GQLNRFVQLSGRPQL

SEQ ID NO: 32083 - protein, 15 aa, synthetic construct
TGQLNRFVQLSGRPQ

SEQ ID NO: 32084 - protein, 15 aa, synthetic construct
KQIYAIKYVNLEKAD

SEQ ID NO: 32085 - protein, 15 aa, synthetic construct
DVLVLNGSQLSARAA

SEQ ID NO: 32086 - protein, 15 aa, synthetic construct
SQAWLGVRGGLVLYN

SEQ ID NO: 32087 - protein, 15 aa, synthetic construct
IECHYEPMESYFLKE

SEQ ID NO: 32088 - protein, 15 aa, synthetic construct
FPFVVLGNNIDLENR

SEQ ID NO: 32089 - protein, 15 aa, synthetic construct
GGFDPQGALRNIAVA

SEQ ID NO: 32090 - protein, 15 aa, synthetic construct
NRFVQLSGRPQLPGK

SEQ ID NO: 32091 - protein, 15 aa, synthetic construct
HEIYIQAKDKGASPE

SEQ ID NO: 32092 - protein, 15 aa, synthetic construct
HYEPMESYFLKETSH

SEQ ID NO: 32093 - protein, 15 aa, synthetic construct
VLYIMLSGYPPFMGH

SEQ ID NO: 32094 - protein, 15 aa, synthetic construct
CGKQISCVAENLVGE

SEQ ID NO: 32095 - protein, 15 aa, synthetic construct
VYDVLVLNGSQLSAR

SEQ ID NO: 32096 - protein, 15 aa, synthetic construct
FGGFDPQGALRNIAV

SEQ ID NO: 32097 - protein, 15 aa, synthetic construct
AIKYVNLEEANNQTL

SEQ ID NO: 32098 - protein, 15 aa, synthetic construct
TLPEFVVYKSQMEDQ

SEQ ID NO: 32099 - protein, 15 aa, synthetic construct
TAILATLPEFVVYKS

SEQ ID NO: 32100 - protein, 15 aa, synthetic construct
SYFLKETSHESVDSS

SEQ ID NO: 32101 - protein, 15 aa, synthetic construct
INEYKMHKEVASKYT

SEQ ID NO: 32102 - protein, 15 aa, synthetic construct
GPWWREGTVAVRGDP

SEQ ID NO: 32103 - protein, 15 aa, synthetic construct
QAMYRAMGQSHKPVP

SEQ ID NO: 32104 - protein, 15 aa, synthetic construct
PEFVVYKSQMEDQKY

SEQ ID NO: 32105 - protein, 15 aa, synthetic construct
QLNRFVQLSGRPQLP

SEQ ID NO: 32106 - protein, 15 aa, synthetic construct
RFVQLSGRPQLPGKK

SEQ ID NO: 32107 - protein, 15 aa, synthetic construct
QVALAKQLAGNIALE

SEQ ID NO: 32108 - protein, 15 aa, synthetic construct
SKVFQVLNEKKHIYA

SEQ ID NO: 32109 - protein, 15 aa, synthetic construct
YAIKYVNLEEANNQT

SEQ ID NO: 32110 - protein, 15 aa, synthetic construct
YGSQAWLGVRGGLVL

SEQ ID NO: 32111 - protein, 15 aa, synthetic construct
QAWLGVRGGLVLYNL

SEQ ID NO: 32112 - protein, 15 aa, synthetic construct
ESYFLKETSHESVDS

SEQ ID NO: 32113 - protein, 15 aa, synthetic construct
NFPFVVLGNNIDLEN

SEQ ID NO: 32114 - protein, 15 aa, synthetic construct
GGFDPQGALRNMAVP

SEQ ID NO: 32115 - protein, 15 aa, synthetic construct
GVVLYIMLSGYPPFM

SEQ ID NO: 32116 - protein, 15 aa, synthetic construct
KLHEIYIQAKDKGAS

SEQ ID NO: 32117 - protein, 15 aa, synthetic construct
EIYIQAKDKGASPEG

SEQ ID NO: 32118 - protein, 15 aa, synthetic construct
ENFPFVVLGNNIDLE

SEQ ID NO: 32119 - protein, 15 aa, synthetic construct
GGFDPQGALRNMAVV

SEQ ID NO: 32120 - protein, 15 aa, synthetic construct
TLVIMGSRAVMDAYL

SEQ ID NO: 32121 - protein, 15 aa, synthetic construct
YDVLVLNGSQLSARA

SEQ ID NO: 32122 - protein, 15 aa, synthetic construct
LTTLVIMGSRAVMDA

SEQ ID NO: 32123 - protein, 15 aa, synthetic construct
RVYDVLVLNGSQLSA

SEQ ID NO: 32124 - protein, 15 aa, synthetic construct
KFGGFDPQGALRNIA

SEQ ID NO: 32125 - protein, 15 aa, synthetic construct
RWAFIPEASYDSGLE

SEQ ID NO: 32126 - protein, 15 aa, synthetic construct
PENFPFVVLGNNIDL

SEQ ID NO: 32127 - protein, 15 aa, synthetic construct
IYAIKYVNLEEANNQ

SEQ ID NO: 32128 - protein, 15 aa, synthetic construct
CHYEPMESYFLKETS

SEQ ID NO: 32129 - protein, 15 aa, synthetic construct
ERGPWWREGTVAVRG

SEQ ID NO: 32130 - protein, 15 aa, synthetic construct
GERGPWWREGTVAVR

SEQ ID NO: 32131 - protein, 15 aa, synthetic construct
VQAMYRAMGQSHKPV

SEQ ID NO: 32132 - protein, 15 aa, synthetic construct
EKKQIYAIKYVNLEK

SEQ ID NO: 32133 - protein, 15 aa, synthetic construct
GSQAWLGVRGGLVLY

SEQ ID NO: 32134 - protein, 15 aa, synthetic construct
ECHYEPMESYFLKET

SEQ ID NO: 32135 - protein, 15 aa, synthetic construct
RGPWWREGTVAVRGD

SEQ ID NO: 32136 - protein, 15 aa, synthetic construct
RIECHYEPMESYFLK

SEQ ID NO: 32137 - protein, 15 aa, synthetic construct
LNRFVQLSGRPQLPG

SEQ ID NO: 32138 - protein, 15 aa, synthetic construct
VVLYIMLSGYPPFMG

SEQ ID NO: 32139 - protein, 15 aa, synthetic construct
ASSEYEEEEEVQAMQ

SEQ ID NO: 32140 - protein, 15 aa, synthetic construct
LHEIYIQAKDKGASP

SEQ ID NO: 32141 - protein, 15 aa, synthetic construct
YRWAFIPEASYDSGL

SEQ ID NO: 32142 - protein, 15 aa, synthetic construct
CLTTLVIMGSRAVMD

SEQ ID NO: 32143 - protein, 15 aa, synthetic construct
SSEYEEEEEVQAMQS

SEQ ID NO: 32144 - protein, 15 aa, synthetic construct
RSAYMLTDPYGSQAW

SEQ ID NO: 32145 - protein, 15 aa, synthetic construct
PGGFGQTAGWQHRPG

SEQ ID NO: 32146 - protein, 15 aa, synthetic construct
VCLTTLVIMGSRAVM

SEQ ID NO: 32147 - protein, 15 aa, synthetic construct
MYRWAFIPEASYDSG

SEQ ID NO: 32148 - protein, 15 aa, synthetic construct
WAFIPEASYDSGLEV

SEQ ID NO: 32149 - protein, 15 aa, synthetic construct
SKFGGFDPQGALRNI

SEQ ID NO: 32150 - protein, 15 aa, synthetic construct
KKHIYAIKYVNLEEA

SEQ ID NO: 32151 - protein, 15 aa, synthetic construct
KKQIYAIKYVNLEKA

SEQ ID NO: 32152 - protein, 15 aa, synthetic construct
PMESYFLKETSHESV

SEQ ID NO: 32153 - protein, 15 aa, synthetic construct
TTLVIMGSRAVMDAY

SEQ ID NO: 32154 - protein, 15 aa, synthetic construct
MESYFLKETSHESVD

SEQ ID NO: 32155 - protein, 15 aa, synthetic construct
WRVYDVLVLNGSQLS

SEQ ID NO: 32156 - protein, 15 aa, synthetic construct
LPEFVVYKSQMEDQK

SEQ ID NO: 32157 - protein, 15 aa, synthetic construct
VVKHNLNIMIKRYNS

SEQ ID NO: 32158 - protein, 15 aa, synthetic construct
STGVILSPGYLDSYP

SEQ ID NO: 32159 - protein, 15 aa, synthetic construct
TRNMAASCRLEEEEY

SEQ ID NO: 32160 - protein, 15 aa, synthetic construct
SPIIQQLEKSDAEYN

SEQ ID NO: 32161 - protein, 15 aa, synthetic construct
VLGNNIDLENRQVAT

SEQ ID NO: 32162 - protein, 15 aa, synthetic construct
EQFAETPKENHNNYR

SEQ ID NO: 32163 - protein, 15 aa, synthetic construct
KHIYAIKYVNLEEAD

SEQ ID NO: 32164 - protein, 15 aa, synthetic construct
KFTQFVHLKRHKRLH

SEQ ID NO: 32165 - protein, 15 aa, synthetic construct
IKYVNLEKADNQTLD

SEQ ID NO: 32166 - protein, 15 aa, synthetic construct
VPKHNLNIMIKRYNS

SEQ ID NO: 32167 - protein, 15 aa, synthetic construct
LGNNIDLENRQVATK

SEQ ID NO: 32168 - protein, 15 aa, synthetic construct
IYAIKYVNLEKADNQ

SEQ ID NO: 32169 - protein, 15 aa, synthetic construct
KINGNWISASSINEA

SEQ ID NO: 32170 - protein, 15 aa, synthetic construct
PAKFTQFVHLKRHKR

SEQ ID NO: 32171 - protein, 15 aa, synthetic construct
AIKYVNLEKADNQTL

SEQ ID NO: 32172 - protein, 15 aa, synthetic construct
VKHNLNIMIKRYNST

SEQ ID NO: 32173 - protein, 15 aa, synthetic construct
EKKHIYAIKYVNLEE

SEQ ID NO: 32174 - protein, 15 aa, synthetic construct
PECGWGLHTRAYEDT

SEQ ID NO: 32175 - protein, 15 aa, synthetic construct
LTRNMAASCRLEEEE

SEQ ID NO: 32176 - protein, 15 aa, synthetic construct
AKFTQFVHLKRHKRL

SEQ ID NO: 32177 - protein, 15 aa, synthetic construct
KVFQVLNEKKHIYAI

SEQ ID NO: 32178 - protein, 15 aa, synthetic construct
CPAKFTQFVHLKRHK

SEQ ID NO: 32179 - protein, 15 aa, synthetic construct
GSEQFAETPKENHNN

SEQ ID NO: 32180 - protein, 15 aa, synthetic construct
PKHNLNIMIKRYNST

SEQ ID NO: 32181 - protein, 15 aa, synthetic construct
QIYAIKYVNLEEANN

SEQ ID NO: 32182 - protein, 15 aa, synthetic construct
GALRNIAVAKHNLNI

SEQ ID NO: 32183 - protein, 15 aa, synthetic construct
SEQFAETPKENHNNY

SEQ ID NO: 32184 - protein, 15 aa, synthetic construct
ECGWGLHTRAYEDTA

SEQ ID NO: 32185 - protein, 15 aa, synthetic construct
IVSKYRCVIRSDGGS

SEQ ID NO: 32186 - protein, 15 aa, synthetic construct
KQIYAIKYVNLEEAN

SEQ ID NO: 32187 - protein, 15 aa, synthetic construct
ALRNIAVAKHNLNIM

SEQ ID NO: 32188 - protein, 15 aa, synthetic construct
RNMAASCRLEEEEYE

SEQ ID NO: 32189 - protein, 15 aa, synthetic construct
TFCLETLPELRDERE

SEQ ID NO: 32190 - protein, 15 aa, synthetic construct
VFQVLNEKKHIYAIK

SEQ ID NO: 32191 - protein, 15 aa, synthetic construct
YAIKYVNLEKADNQT

SEQ ID NO: 32192 - protein, 15 aa, synthetic construct
TQFVHLKRHKRLHTR

SEQ ID NO: 32193 - protein, 15 aa, synthetic construct
EFVVYKSQMEDQKYK

SEQ ID NO: 32194 - protein, 15 aa, synthetic construct
QGSLRITNISSDDCG

SEQ ID NO: 32195 - protein, 15 aa, synthetic construct
LRNIAVAKHNLNIMI

SEQ ID NO: 32196 - protein, 15 aa, synthetic construct
DPENFPFVVLGNNID

SEQ ID NO: 32197 - protein, 15 aa, synthetic construct
QLCILINNIPDESQV

SEQ ID NO: 32198 - protein, 15 aa, synthetic construct
VQLCILINNIPDESQ

SEQ ID NO: 32199 - protein, 15 aa, synthetic construct
RIVSKYRCVIRSDGG

SEQ ID NO: 32200 - protein, 15 aa, synthetic construct
GNNIDLENRQVATKR

SEQ ID NO: 32201 - protein, 15 aa, synthetic construct
FTQFVHLKRHKRLHT

SEQ ID NO: 32202 - protein, 15 aa, synthetic construct
HIYAIKYVNLEEADN

SEQ ID NO: 32203 - protein, 15 aa, synthetic construct
EPMESYFLKETSHES

SEQ ID NO: 32204 - protein, 15 aa, synthetic construct
LLTRNMAASCRLEEE

SEQ ID NO: 32205 - protein, 15 aa, synthetic construct
KVIVVRNRRLGVLYH

SEQ ID NO: 32206 - protein, 15 aa, synthetic construct
ATLPEFVVYKSQMED

SEQ ID NO: 32207 - protein, 15 aa, synthetic construct
LGSEQFAETPKENHN

SEQ ID NO: 32208 - protein, 15 aa, synthetic construct
NNIDLENRQVATKRA

SEQ ID NO: 32209 - protein, 15 aa, synthetic construct
PFVVLGNNIDLENRQ

SEQ ID NO: 32210 - protein, 15 aa, synthetic construct
QIYAIKYVNLEKADN

SEQ ID NO: 32211 - protein, 15 aa, synthetic construct
NEKKHIYAIKYVNLE

SEQ ID NO: 32212 - protein, 15 aa, synthetic construct
NINEYKMHKEVASKY

SEQ ID NO: 32213 - protein, 15 aa, synthetic construct
RPECGWGLHTRAYED

SEQ ID NO: 32214 - protein, 15 aa, synthetic construct
WGLHTRAYEDTADDG

SEQ ID NO: 32215 - protein, 15 aa, synthetic construct
ETPDNQVSAEVQFRH

SEQ ID NO: 32216 - protein, 15 aa, synthetic construct
FSATVSVADTAQRIV

SEQ ID NO: 32217 - protein, 15 aa, synthetic construct
PPETAAAATPAAAAS

SEQ ID NO: 32218 - protein, 15 aa, synthetic construct
TPDNQVSAEVQFRHR

SEQ ID NO: 32219 - protein, 15 aa, synthetic construct
RSNHAAEEASSEYEE

SEQ ID NO: 32220 - protein, 15 aa, synthetic construct
WREGTVAVRGDPGGE

SEQ ID NO: 32221 - protein, 15 aa, synthetic construct
SRSHSRSRSASSNSR

SEQ ID NO: 32222 - protein, 15 aa, synthetic construct
SRSRSHSRSRSASSN

SEQ ID NO: 32223 - protein, 15 aa, synthetic construct
IQAKDKGASPEGAHC

SEQ ID NO: 32224 - protein, 15 aa, synthetic construct
ETAAAATPAAAASSS

SEQ ID NO: 32225 - protein, 15 aa, synthetic construct
KNKINGNWISASSIN

SEQ ID NO: 32226 - protein, 15 aa, synthetic construct
PPRSNHAAEEASSEY

SEQ ID NO: 32227 - protein, 15 aa, synthetic construct
AWLGVRGGLVLYNLP

SEQ ID NO: 32228 - protein, 15 aa, synthetic construct
SNHAAEEASSEYEEE

SEQ ID NO: 32229 - protein, 15 aa, synthetic construct
IYIQAKDKGASPEGA

SEQ ID NO: 32230 - protein, 15 aa, synthetic construct
LPPPETAAAATPAAA

SEQ ID NO: 32231 - protein, 15 aa, synthetic construct
SHSRSRSASSNSRKS

SEQ ID NO: 32232 - protein, 15 aa, synthetic construct
PRSNHAAEEASSEYE

SEQ ID NO: 32233 - protein, 15 aa, synthetic construct
QAKDKGASPEGAHCK

SEQ ID NO: 32234 - protein, 15 aa, synthetic construct
SGDEENAGTEEIKNK

SEQ ID NO: 32235 - protein, 15 aa, synthetic construct
QERATEAENVPSVIP

SEQ ID NO: 32236 - protein, 15 aa, synthetic construct
AAAATPAAAASSSAA

SEQ ID NO: 32237 - protein, 15 aa, synthetic construct
EHDQHVTHSDISDPK

SEQ ID NO: 32238 - protein, 15 aa, synthetic construct
MLTDPYGSQAWLGVR

SEQ ID NO: 32239 - protein, 15 aa, synthetic construct
NVLSGGTTTYPGIAD

SEQ ID NO: 32240 - protein, 15 aa, synthetic construct
RFSATVSVADTAQRI

SEQ ID NO: 32241 - protein, 15 aa, synthetic construct
TESSETTTATTTGSE

SEQ ID NO: 32242 - protein, 15 aa, synthetic construct
KGIIHLVTESQSLNK

SEQ ID NO: 32243 - protein, 15 aa, synthetic construct
EAQERATEAENVPSV

SEQ ID NO: 32244 - protein, 15 aa, synthetic construct
PAAAASSSAASPHYQ

SEQ ID NO: 32245 - protein, 15 aa, synthetic construct
ALPPPETAAAATPAA

SEQ ID NO: 32246 - protein, 15 aa, synthetic construct
TDPYGSQAWLGVRGG

SEQ ID NO: 32247 - protein, 15 aa, synthetic construct
FDPQGALTNMAVAKH

SEQ ID NO: 32248 - protein, 15 aa, synthetic construct
AATPAAAASSSAASP

SEQ ID NO: 32249 - protein, 15 aa, synthetic construct
TATTTGSETTTASTE

SEQ ID NO: 32250 - protein, 15 aa, synthetic construct
IQQLEKSDAEYNNSP

SEQ ID NO: 32251 - protein, 15 aa, synthetic construct
QMYRWAFIPEASYDS

SEQ ID NO: 32252 - protein, 15 aa, synthetic construct
GFDPQGALTNMAVAK

SEQ ID NO: 32253 - protein, 15 aa, synthetic construct
GWGLHTRAYEDTADD

SEQ ID NO: 32254 - protein, 15 aa, synthetic construct
GGFDPQGALTNMAVA

SEQ ID NO: 32255 - protein, 15 aa, synthetic construct
ATPAAAASSSAASPH

SEQ ID NO: 32256 - protein, 15 aa, synthetic construct
WWREGTVAVRGDPGG

SEQ ID NO: 32257 - protein, 15 aa, synthetic construct
GRDLLFGFDPLAFPE

SEQ ID NO: 32258 - protein, 15 aa, synthetic construct
QGALRNIAVAKHNLN

SEQ ID NO: 32259 - protein, 15 aa, synthetic construct
YIQAKDKGASPEGAH

SEQ ID NO: 32260 - protein, 15 aa, synthetic construct
PQGALRNIAVAKHNL

SEQ ID NO: 32261 - protein, 15 aa, synthetic construct
RSHSRSRSASSNSRK

SEQ ID NO: 32262 - protein, 15 aa, synthetic construct
DQHVTHSDISDPKNS

SEQ ID NO: 32263 - protein, 15 aa, synthetic construct
TAAAATPAAAASSSA

SEQ ID NO: 32264 - protein, 15 aa, synthetic construct
EGTVAVRGDPGGERG

SEQ ID NO: 32265 - protein, 15 aa, synthetic construct
FQMYRWAFIPEASYD

SEQ ID NO: 32266 - protein, 15 aa, synthetic construct
DPQGALTNMAVAKHN

SEQ ID NO: 32267 - protein, 15 aa, synthetic construct
MEHDQHVTHSDISDP

SEQ ID NO: 32268 - protein, 15 aa, synthetic construct
SSETTTATTTGSETT

SEQ ID NO: 32269 - protein, 15 aa, synthetic construct
QGALRNMAVPKHNLN

SEQ ID NO: 32270 - protein, 15 aa, synthetic construct
PPPETAAAATPAAAA

SEQ ID NO: 32271 - protein, 15 aa, synthetic construct
YEIEDGSTPNGRDLL

SEQ ID NO: 32272 - protein, 15 aa, synthetic construct
QGALRNMAVVKHNLN

SEQ ID NO: 32273 - protein, 15 aa, synthetic construct
AKDKGASPEGAHCKV

SEQ ID NO: 32274 - protein, 15 aa, synthetic construct
HDQHVTHSDISDPKN

SEQ ID NO: 32275 - protein, 15 aa, synthetic construct
AAATPAAAASSSAAS

SEQ ID NO: 32276 - protein, 15 aa, synthetic construct
PETAAAATPAAAASS

SEQ ID NO: 32277 - protein, 15 aa, synthetic construct
PDNQVSAEVQFRHRT

SEQ ID NO: 32278 - protein, 15 aa, synthetic construct
TPAAAASSSAASPHY

SEQ ID NO: 32279 - protein, 15 aa, synthetic construct
AQERATEAENVPSVI

SEQ ID NO: 32280 - protein, 15 aa, synthetic construct
GDEENAGTEEIKNKI

SEQ ID NO: 32281 - protein, 15 aa, synthetic construct
LTDPYGSQAWLGVRG

SEQ ID NO: 32282 - protein, 15 aa, synthetic construct
PALPPPETAAAATPA

SEQ ID NO: 32283 - protein, 15 aa, synthetic construct
LNGSQLSARAADGSP

SEQ ID NO: 32284 - protein, 15 aa, synthetic construct
QFQMYRWAFIPEASY

SEQ ID NO: 32285 - protein, 15 aa, synthetic construct
ESSETTTATTTGSET

SEQ ID NO: 32286 - protein, 15 aa, synthetic construct
FEAQERATEAENVPS

SEQ ID NO: 32287 - protein, 15 aa, synthetic construct
SATVSVADTAQRIVS

SEQ ID NO: 32288 - protein, 15 aa, synthetic construct
PWWREGTVAVRGDPG

SEQ ID NO: 32289 - protein, 15 aa, synthetic construct
NNQTLDSYRNEIAYL

SEQ ID NO: 32290 - protein, 15 aa, synthetic construct
HRVVDTFQDYFGVCL

SEQ ID NO: 32291 - protein, 15 aa, synthetic construct
LQDVNTNINEYKMHK

SEQ ID NO: 32292 - protein, 15 aa, synthetic construct
PGYLDSYPNLQMCAW

SEQ ID NO: 32293 - protein, 15 aa, synthetic construct
SRAVMDAYLVEQNQG

SEQ ID NO: 32294 - protein, 15 aa, synthetic construct
LSPGYLDSYPNLQMC

SEQ ID NO: 32295 - protein, 15 aa, synthetic construct
RDLLFGFDPLAFPEF

SEQ ID NO: 32296 - protein, 15 aa, synthetic construct
ANNQTLDSYRNEIAY

SEQ ID NO: 32297 - protein, 15 aa, synthetic construct
TNINEYKMHKEVASK

SEQ ID NO: 32298 - protein, 15 aa, synthetic construct
IMGSRAVMDAYLVEQ

SEQ ID NO: 32299 - protein, 15 aa, synthetic construct
VIMGSRAVMDAYLVE

SEQ ID NO: 32300 - protein, 15 aa, synthetic construct
QDVNTNINEYKMHKE

SEQ ID NO: 32301 - protein, 15 aa, synthetic construct
CILINNIPDESQVEK

SEQ ID NO: 32302 - protein, 15 aa, synthetic construct
ILSPGYLDSYPNLQM

SEQ ID NO: 32303 - protein, 15 aa, synthetic construct
LEKSDAEYNNSPLVP

SEQ ID NO: 32304 - protein, 15 aa, synthetic construct
PKENHNNYRTLLEKE

SEQ ID NO: 32305 - protein, 15 aa, synthetic construct
RAVMDAYLVEQNQGP

SEQ ID NO: 32306 - protein, 15 aa, synthetic construct
DVNTNINEYKMHKEV

SEQ ID NO: 32307 - protein, 15 aa, synthetic construct
SPGYLDSYPNLQMCA

SEQ ID NO: 32308 - protein, 15 aa, synthetic construct
FQDYFGVCLEPVIKD

SEQ ID NO: 32309 - protein, 15 aa, synthetic construct
YEPMESYFLKETSHE

SEQ ID NO: 32310 - protein, 15 aa, synthetic construct
KENHNNYRTLLEKEK

SEQ ID NO: 32311 - protein, 15 aa, synthetic construct
GSRAVMDAYLVEQNQ

SEQ ID NO: 32312 - protein, 15 aa, synthetic construct
TLHDWYGQEIVELQQ

SEQ ID NO: 32313 - protein, 15 aa, synthetic construct
VNTNINEYKMHKEVA

SEQ ID NO: 32314 - protein, 15 aa, synthetic construct
YQNWRVYDVLVLNGS

SEQ ID NO: 32315 - protein, 15 aa, synthetic construct
AKQLAGNIALELQAY

SEQ ID NO: 32316 - protein, 15 aa, synthetic construct
EKSDAEYNNSPLVPT

SEQ ID NO: 32317 - protein, 15 aa, synthetic construct
NTNINEYKMHKEVAS

SEQ ID NO: 32318 - protein, 15 aa, synthetic construct
HNYQNWRVYDVLVLN

SEQ ID NO: 32319 - protein, 15 aa, synthetic construct
STLHDWYGQEIVELQ

SEQ ID NO: 32320 - protein, 15 aa, synthetic construct
QDYFGVCLEPVIKDN

SEQ ID NO: 32321 - protein, 15 aa, synthetic construct
SCRLEEEEYEDDAYG

SEQ ID NO: 32322 - protein, 15 aa, synthetic construct
RVVDTFQDYFGVCLE

SEQ ID NO: 32323 - protein, 15 aa, synthetic construct
MGSRAVMDAYLVEQN

SEQ ID NO: 32324 - protein, 15 aa, synthetic construct
KADNQTLDSYRNEIA

SEQ ID NO: 32325 - protein, 15 aa, synthetic construct
CGWGLHTRAYEDTAD

SEQ ID NO: 32326 - protein, 15 aa, synthetic construct
NGRDLLFGFDPLAFP

SEQ ID NO: 32327 - protein, 15 aa, synthetic construct
NYQNWRVYDVLVLNG

SEQ ID NO: 32328 - protein, 15 aa, synthetic construct
KGASPEGAHCKVLVE

SEQ ID NO: 32329 - protein, 15 aa, synthetic construct
WLGVRGGLVLYNLPF

SEQ ID NO: 32330 - protein, 15 aa, synthetic construct
GTTTYPGIADRMQKE

SEQ ID NO: 32331 - protein, 15 aa, synthetic construct
AYMLTDPYGSQAWLG

SEQ ID NO: 32332 - protein, 15 aa, synthetic construct
LYDPCRSADIALVAG

SEQ ID NO: 32333 - protein, 15 aa, synthetic construct
SGGTTTYPGIADRMQ

SEQ ID NO: 32334 - protein, 15 aa, synthetic construct
YMLTDPYGSQAWLGV

SEQ ID NO: 32335 - protein, 15 aa, synthetic construct
VPPTGDAGAPPVPPT

SEQ ID NO: 32336 - protein, 15 aa, synthetic construct
GGTTTYPGIADRMQK

SEQ ID NO: 32337 - protein, 15 aa, synthetic construct
GASPEGAHCKVLVEV

SEQ ID NO: 32338 - protein, 15 aa, synthetic construct
PGIPGQASLLQAAPG

SEQ ID NO: 32339 - protein, 15 aa, synthetic construct
DPYGSQAWLGVRGGL

SEQ ID NO: 32340 - protein, 15 aa, synthetic construct
PVPPTGDAGAPPVPP

SEQ ID NO: 32341 - protein, 15 aa, synthetic construct
VCPAKFTQFVHLKRH

SEQ ID NO: 32342 - protein, 15 aa, synthetic construct
TVAVRGDPGGERGPW

SEQ ID NO: 32343 - protein, 15 aa, synthetic construct
IKNKINGNWISASSI

SEQ ID NO: 32344 - protein, 15 aa, synthetic construct
GTVAVRGDPGGERGP

SEQ ID NO: 32345 - protein, 15 aa, synthetic construct
DRILWVQAMYRAMGQ

SEQ ID NO: 32346 - protein, 15 aa, synthetic construct
NEYKMHKEVASKYTK

SEQ ID NO: 32347 - protein, 15 aa, synthetic construct
LPELRDERELLRHPP

SEQ ID NO: 32348 - protein, 15 aa, synthetic construct
QDRILWVQAMYRAMG

SEQ ID NO: 32349 - protein, 15 aa, synthetic construct
EIKNKINGNWISASS

SEQ ID NO: 32350 - protein, 15 aa, synthetic construct
EQDRILWVQAMYRAM

SEQ ID NO: 32351 - protein, 15 aa, synthetic construct
SLRITNISSDDCGKQ

SEQ ID NO: 32352 - protein, 15 aa, synthetic construct
QNWRVYDVLVLNGSQ

SEQ ID NO: 32353 - protein, 15 aa, synthetic construct
AQRIVSKYRCVIRSD

SEQ ID NO: 32354 - protein, 15 aa, synthetic construct
REGTVAVRGDPGGER

SEQ ID NO: 32355 - protein, 15 aa, synthetic construct
QRIVSKYRCVIRSDG

SEQ ID NO: 32356 - protein, 10 aa, synthetic construct
GSQLPGKVKY

SEQ ID NO: 32357 - protein, 11 aa, synthetic construct
REEYSAMRDQY

SEQ ID NO: 32358 - protein, 10 aa, synthetic construct
SGGPLMHSHY

SEQ ID NO: 32359 - protein, 10 aa, synthetic construct
ALGGYDGQAY

SEQ ID NO: 32360 - protein, 10 aa, synthetic construct
VSSSEQPQSY

SEQ ID NO: 32361 - protein, 9 aa, synthetic construct
FRDRTDIQY

SEQ ID NO: 32362 - protein, 11 aa, synthetic construct
IANNGGLKAAY

SEQ ID NO: 32363 - protein, 10 aa, synthetic construct
ELPLHLNTRY

SEQ ID NO: 32364 - protein, 9 aa, synthetic construct
LGGYDGQAY

SEQ ID NO: 32365 - protein, 9 aa, synthetic construct
LGSDVGGGY

SEQ ID NO: 32366 - protein, 9 aa, synthetic construct
SSSEQPQSY

SEQ ID NO: 32367 - protein, 10 aa, synthetic construct
LVSMGGEQVY

SEQ ID NO: 32368 - protein, 9 aa, synthetic construct
VVKTSVQWY

SEQ ID NO: 32369 - protein, 10 aa, synthetic construct
YTIMAYTLTY

SEQ ID NO: 32370 - protein, 9 aa, synthetic construct
CLSFLLSGY

SEQ ID NO: 32371 - protein, 9 aa, synthetic construct
YVTLAGSEY

SEQ ID NO: 32372 - protein, 9 aa, synthetic construct
KLDQEVALL

SEQ ID NO: 32373 - protein, 11 aa, synthetic construct
DILDTAGREEY

SEQ ID NO: 32374 - protein, 11 aa, synthetic construct
TEEKPDKCEEY

SEQ ID NO: 32375 - protein, 11 aa, synthetic construct
LDQEVALLGSY

SEQ ID NO: 32376 - protein, 9 aa, synthetic construct
MQEGVRSEF

SEQ ID NO: 32377 - protein, 11 aa, synthetic construct
SSAYCLVHCCY

SEQ ID NO: 32378 - protein, 10 aa, synthetic construct
FYVTLAGSEY

SEQ ID NO: 32379 - protein, 10 aa, synthetic construct
VTDIPQGMVT

SEQ ID NO: 32380 - protein, 9 aa, synthetic construct
EVDIKGPKL

SEQ ID NO: 32381 - protein, 9 aa, synthetic construct
ELTDSCHPY

SEQ ID NO: 32382 - protein, 10 aa, synthetic construct
GSQLAPEKHY

SEQ ID NO: 32383 - protein, 11 aa, synthetic construct
TSGGPLMHSHY

SEQ ID NO: 32384 - protein, 11 aa, synthetic construct
TTLADYLHLLH

SEQ ID NO: 32385 - protein, 11 aa, synthetic construct
LSFLLSGYTPY

SEQ ID NO: 32386 - protein, 11 aa, synthetic construct
VVSSSEQPQSY

SEQ ID NO: 32387 - protein, 10 aa, synthetic construct
MDPAEEGRIY

SEQ ID NO: 32388 - protein, 9 aa, synthetic construct
ITDVDLIYQ

SEQ ID NO: 32389 - protein, 8 aa, synthetic construct
ITDVDLIY

SEQ ID NO: 32390 - protein, 9 aa, synthetic construct
SSEQPQSYQ

SEQ ID NO: 32391 - protein, 8 aa, synthetic construct
SSEQPQSY

SEQ ID NO: 32392 - protein, 10 aa, synthetic construct
SCHPYRSAFY

SEQ ID NO: 32393 - protein, 9 aa, synthetic construct
YTEEKPDKC

SEQ ID NO: 32394 - protein, 10 aa, synthetic construct
IFRDRTDIQY

SEQ ID NO: 32395 - protein, 9 aa, synthetic construct
SVEFGPAEF

SEQ ID NO: 32396 - protein, 9 aa, synthetic construct
VSMGGEQVY

SEQ ID NO: 32397 - protein, 11 aa, synthetic construct
FQIYETLRPRY

SEQ ID NO: 32398 - protein, 8 aa, synthetic construct
LTDSCHPY

SEQ ID NO: 32399 - protein, 9 aa, synthetic construct
LTDSCHPYR

SEQ ID NO: 32400 - protein, 9 aa, synthetic construct
LADYLHLLH

SEQ ID NO: 32401 - protein, 11 aa, synthetic construct
YALGGYDGQAY

SEQ ID NO: 32402 - protein, 9 aa, synthetic construct
FLLSGYTPY

SEQ ID NO: 32403 - protein, 9 aa, synthetic construct
SSEAGHVLR

SEQ ID NO: 32404 - protein, 9 aa, synthetic construct
SQLPGKVKY

SEQ ID NO: 32405 - protein, 11 aa, synthetic construct
QIFRDRTDIQY

SEQ ID NO: 32406 - protein, 8 aa, synthetic construct
GSDVGGGY

SEQ ID NO: 32407 - protein, 9 aa, synthetic construct
RPEKPALEF

SEQ ID NO: 32408 - protein, 8 aa, synthetic construct
VTLAGSEY

SEQ ID NO: 32409 - protein, 9 aa, synthetic construct
TIMAYTLTY

SEQ ID NO: 32410 - protein, 11 aa, synthetic construct
ILDTAGREEYS

SEQ ID NO: 32411 - protein, 10 aa, synthetic construct
ILGSDVGGGY

SEQ ID NO: 32412 - protein, 9 aa, synthetic construct
VTDIPQGMV

SEQ ID NO: 32413 - protein, 8 aa, synthetic construct
VTDIPQGM

SEQ ID NO: 32414 - protein, 10 aa, synthetic construct
VSITDVDLIY

SEQ ID NO: 32415 - protein, 9 aa, synthetic construct
KSRLMFAMY

SEQ ID NO: 32416 - protein, 11 aa, synthetic construct
LILGSDVGGGY

SEQ ID NO: 32417 - protein, 8 aa, synthetic construct
DTAGREEY

SEQ ID NO: 32418 - protein, 9 aa, synthetic construct
IYETLRPRY

SEQ ID NO: 32419 - protein, 11 aa, synthetic construct
LLVSMGGEQVY

SEQ ID NO: 32420 - protein, 10 aa, synthetic construct
SSSEQPQSYQ

SEQ ID NO: 32421 - protein, 9 aa, synthetic construct
SITDVDLIY

SEQ ID NO: 32422 - protein, 9 aa, synthetic construct
FSSEAGHVL

SEQ ID NO: 32423 - protein, 10 aa, synthetic construct
QIYETLRPRY

SEQ ID NO: 32424 - protein, 10 aa, synthetic construct
ILDTAGREEY

SEQ ID NO: 32425 - protein, 9 aa, synthetic construct
AFDDDTGRY

SEQ ID NO: 32426 - protein, 8 aa, synthetic construct
IMAYTLTY

SEQ ID NO: 32427 - protein, 9 aa, synthetic construct
SQLAPEKHY

SEQ ID NO: 32428 - protein, 11 aa, synthetic construct
CLELTDSCHPY

SEQ ID NO: 32429 - protein, 11 aa, synthetic construct
YSKLDQEVALL

SEQ ID NO: 32430 - protein, 10 aa, synthetic construct
DVDLIYQNEF

SEQ ID NO: 32431 - protein, 9 aa, synthetic construct
FKFSIELFY

SEQ ID NO: 32432 - protein, 11 aa, synthetic construct
LGDKLYALGGY

SEQ ID NO: 32433 - protein, 11 aa, synthetic construct
LTIVPSSASAY

SEQ ID NO: 32434 - protein, 11 aa, synthetic construct
DSCHPYRSAFY

SEQ ID NO: 32435 - protein, 10 aa, synthetic construct
RIESLINRDY

SEQ ID NO: 32436 - protein, 8 aa, synthetic construct
FDDDTGRY

SEQ ID NO: 32437 - protein, 11 aa, synthetic construct
AEAFDDDTGRY

SEQ ID NO: 32438 - protein, 10 aa, synthetic construct
TLADYLHLLH

SEQ ID NO: 32439 - protein, 11 aa, synthetic construct
LSDKGTTPLQF

SEQ ID NO: 32440 - protein, 9 aa, synthetic construct
LDTAGREEY

SEQ ID NO: 32441 - protein, 11 aa, synthetic construct
DVFKFSIELFY

SEQ ID NO: 32442 - protein, 10 aa, synthetic construct
EAFDDDTGRY

SEQ ID NO: 32443 - protein, 9 aa, synthetic construct
ASDIWAMAV

SEQ ID NO: 32444 - protein, 11 aa, synthetic construct
VVSITDVDLIY

SEQ ID NO: 32445 - protein, 9 aa, synthetic construct
KVDLKGPEV

SEQ ID NO: 32446 - protein, 9 aa, synthetic construct
YTHEEYISF

SEQ ID NO: 32447 - protein, 11 aa, synthetic construct
FFYVTLAGSEY

SEQ ID NO: 32448 - protein, 9 aa, synthetic construct
LPLHLNTRY

SEQ ID NO: 32449 - protein, 10 aa, synthetic construct
DQEVALLGSY

SEQ ID NO: 32450 - protein, 11 aa, synthetic construct
KMMPCDFLIPV

SEQ ID NO: 32451 - protein, 11 aa, synthetic construct
ALGGYDGQAYL

SEQ ID NO: 32452 - protein, 10 aa, synthetic construct
SVLESPVLLI

SEQ ID NO: 32453 - protein, 9 aa, synthetic construct
RLMFAMYDL

SEQ ID NO: 32454 - protein, 9 aa, synthetic construct
MLAGRPHQT

SEQ ID NO: 32455 - protein, 9 aa, synthetic construct
RLVSKGTLV

SEQ ID NO: 32456 - protein, 9 aa, synthetic construct
YLVPILTHT

SEQ ID NO: 32457 - protein, 10 aa, synthetic construct
SLKENLVPQI

SEQ ID NO: 32458 - protein, 9 aa, synthetic construct
AVFMWTAKL

SEQ ID NO: 32459 - protein, 11 aa, synthetic construct
ALLSAIQEIEM

SEQ ID NO: 32460 - protein, 9 aa, synthetic construct
VTLDQFICL

SEQ ID NO: 32461 - protein, 9 aa, synthetic construct
QLLQALKLV

SEQ ID NO: 32462 - protein, 9 aa, synthetic construct
HLAFQIYET

SEQ ID NO: 32463 - protein, 10 aa, synthetic construct
YLVPILTHTL

SEQ ID NO: 32464 - protein, 11 aa, synthetic construct
YLVPILTHTLT

SEQ ID NO: 32465 - protein, 10 aa, synthetic construct
FLLSGYTPYT

SEQ ID NO: 32466 - protein, 11 aa, synthetic construct
AMYDLDENGFL

SEQ ID NO: 32467 - protein, 10 aa, synthetic construct
AILGRQPPNV

SEQ ID NO: 32468 - protein, 9 aa, synthetic construct
SMGGEQVYL

SEQ ID NO: 32469 - protein, 10 aa, synthetic construct
KVLLNIIQDL

SEQ ID NO: 32470 - protein, 9 aa, synthetic construct
NMLAAKIAV

SEQ ID NO: 32471 - protein, 10 aa, synthetic construct
QLAPEKHYEI

SEQ ID NO: 32472 - protein, 10 aa, synthetic construct
SKLDQEVALL

SEQ ID NO: 32473 - protein, 9 aa, synthetic construct
ILGRQPPNV

SEQ ID NO: 32474 - protein, 9 aa, synthetic construct
ALLSAIQEI

SEQ ID NO: 32475 - protein, 9 aa, synthetic construct
YTLTYISSV

SEQ ID NO: 32476 - protein, 9 aa, synthetic construct
FSIELFYTM

SEQ ID NO: 32477 - protein, 9 aa, synthetic construct
MVPGNATGV

SEQ ID NO: 32478 - protein, 11 aa, synthetic construct
GFSVLESPVLL

SEQ ID NO: 32479 - protein, 9 aa, synthetic construct
LVPILTHTL

SEQ ID NO: 32480 - protein, 9 aa, synthetic construct
TLAGSEYFL

SEQ ID NO: 32481 - protein, 10 aa, synthetic construct
YMPYGLALTV

SEQ ID NO: 32482 - protein, 10 aa, synthetic construct
QALLSAIQEI

SEQ ID NO: 32483 - protein, 9 aa, synthetic construct
AIQEIEMHA

SEQ ID NO: 32484 - protein, 9 aa, synthetic construct
GQFAEHQKI

SEQ ID NO: 32485 - protein, 10 aa, synthetic construct
YDLDPGDGSL

SEQ ID NO: 32486 - protein, 11 aa, synthetic construct
GMLPVALPPAA

SEQ ID NO: 32487 - protein, 10 aa, synthetic construct
GMLPVALPPA

SEQ ID NO: 32488 - protein, 10 aa, synthetic construct
MLAGRPHQTL

SEQ ID NO: 32489 - protein, 11 aa, synthetic construct
VCLLGDKLYAL

SEQ ID NO: 32490 - protein, 9 aa, synthetic construct
SIRAIMWHV

SEQ ID NO: 32491 - protein, 10 aa, synthetic construct
MMVPGNATGV

SEQ ID NO: 32492 - protein, 10 aa, synthetic construct
FLGGTGLHPA

SEQ ID NO: 32493 - protein, 11 aa, synthetic construct
QYLVPILTHTL

SEQ ID NO: 32494 - protein, 9 aa, synthetic construct
MLAAKIAVL

SEQ ID NO: 32495 - protein, 10 aa, synthetic construct
MMPCDFLIPV

SEQ ID NO: 32496 - protein, 10 aa, synthetic construct
CLLGDKLYAL

SEQ ID NO: 32497 - protein, 9 aa, synthetic construct
VLLNIIQDL

SEQ ID NO: 32498 - protein, 9 aa, synthetic construct
ILRPEKPAL

SEQ ID NO: 32499 - protein, 10 aa, synthetic construct
FSVLESPVLL

SEQ ID NO: 32500 - protein, 9 aa, synthetic construct
YLHLLHAAA

SEQ ID NO: 32501 - protein, 10 aa, synthetic construct
TPLGELRPEV

SEQ ID NO: 32502 - protein, 11 aa, synthetic construct
YVTLAGSEYFL

SEQ ID NO: 32503 - protein, 11 aa, synthetic construct
IAHLIDGILVA

SEQ ID NO: 32504 - protein, 9 aa, synthetic construct
HLLHAAAQA

SEQ ID NO: 32505 - protein, 10 aa, synthetic construct
YTHEEYISFV

SEQ ID NO: 32506 - protein, 9 aa, synthetic construct
TLAEHRELI

SEQ ID NO: 32507 - protein, 9 aa, synthetic construct
ALTGNVNML

SEQ ID NO: 32508 - protein, 10 aa, synthetic construct
LLVSMGGEQV

SEQ ID NO: 32509 - protein, 8 aa, synthetic construct
KLENIATL

SEQ ID NO: 32510 - protein, 9 aa, synthetic construct
GLHPAAPGA

SEQ ID NO: 32511 - protein, 9 aa, synthetic construct
VLESPVLLI

SEQ ID NO: 32512 - protein, 8 aa, synthetic construct
VLESPVLL

SEQ ID NO: 32513 - protein, 9 aa, synthetic construct
IMAYTLTYI

SEQ ID NO: 32514 - protein, 11 aa, synthetic construct
KENLVPQINLA

SEQ ID NO: 32515 - protein, 10 aa, synthetic construct
FMWTAKLENI

SEQ ID NO: 32516 - protein, 9 aa, synthetic construct
FVLNSGSGL

SEQ ID NO: 32517 - protein, 10 aa, synthetic construct
VTLAGSEYFL

SEQ ID NO: 32518 - protein, 11 aa, synthetic construct
RLNGDLLAQEA

SEQ ID NO: 32519 - protein, 11 aa, synthetic construct
FLANVAHANRV

SEQ ID NO: 32520 - protein, 11 aa, synthetic construct
FLDCCNYMTEL

SEQ ID NO: 32521 - protein, 9 aa, synthetic construct
LLGDKLYAL

SEQ ID NO: 32522 - protein, 8 aa, synthetic construct
KLDQEVAL

SEQ ID NO: 32523 - protein, 11 aa, synthetic construct
TLTYISSVLQA

SEQ ID NO: 32524 - protein, 9 aa, synthetic construct
MILQAVLSL

SEQ ID NO: 32525 - protein, 10 aa, synthetic construct
HLAFQIYETL

SEQ ID NO: 32526 - protein, 9 aa, synthetic construct
TLITFGCSV

SEQ ID NO: 32527 - protein, 10 aa, synthetic construct
TLAGSEYFLL

SEQ ID NO: 32528 - protein, 11 aa, synthetic construct
TLADYLHLLHA

SEQ ID NO: 32529 - protein, 8 aa, synthetic construct
WLLPPVTL

SEQ ID NO: 32530 - protein, 9 aa, synthetic construct
KMMPCDFLI

SEQ ID NO: 32531 - protein, 9 aa, synthetic construct
LLHAAAQAL

SEQ ID NO: 32532 - protein, 9 aa, synthetic construct
ALSRKGHRV

SEQ ID NO: 32533 - protein, 9 aa, synthetic construct
SVLESPVLL

SEQ ID NO: 32534 - protein, 9 aa, synthetic construct
ALFGQPPFP

SEQ ID NO: 32535 - protein, 11 aa, synthetic construct
RLDGSQLPGKV

SEQ ID NO: 32536 - protein, 9 aa, synthetic construct
MLPVALPPA

SEQ ID NO: 32537 - protein, 10 aa, synthetic construct
QPPGRRRELL

SEQ ID NO: 32538 - protein, 10 aa, synthetic construct
KPKLAHFAWI

SEQ ID NO: 32539 - protein, 10 aa, synthetic construct
RPRASTSSSG

SEQ ID NO: 32540 - protein, 11 aa, synthetic construct
RPRASTSSSGS

SEQ ID NO: 32541 - protein, 11 aa, synthetic construct
SGGPLMHSHYF

SEQ ID NO: 32542 - protein, 9 aa, synthetic construct
RPMVAPQNG

SEQ ID NO: 32543 - protein, 9 aa, synthetic construct
RPHQTLKGT

SEQ ID NO: 32544 - protein, 8 aa, synthetic construct
APEKHYEI

SEQ ID NO: 32545 - protein, 11 aa, synthetic construct
RQVPGGRETPL

SEQ ID NO: 32546 - protein, 11 aa, synthetic construct
AGRPRASTSSS

SEQ ID NO: 32547 - protein, 11 aa, synthetic construct
SKQPTLQAAEL

SEQ ID NO: 32548 - protein, 10 aa, synthetic construct
IPMPPSRPQP

SEQ ID NO: 32549 - protein, 11 aa, synthetic construct
KPPVSSGSGSL

SEQ ID NO: 32550 - protein, 8 aa, synthetic construct
PSRSFSEL

SEQ ID NO: 32551 - protein, 9 aa, synthetic construct
QPPGRRREL

SEQ ID NO: 32552 - protein, 9 aa, synthetic construct
VPGNATGVA

SEQ ID NO: 32553 - protein, 11 aa, synthetic construct
LPAAPGRDPSA

SEQ ID NO: 32554 - protein, 9 aa, synthetic construct
APRRRSLKE

SEQ ID NO: 32555 - protein, 9 aa, synthetic construct
RPQPRGAPR

SEQ ID NO: 32556 - protein, 11 aa, synthetic construct
SPNGTELLVSM

SEQ ID NO: 32557 - protein, 11 aa, synthetic construct
AAQPPGRRREL

SEQ ID NO: 32558 - protein, 9 aa, synthetic construct
QPPFPSRSF

SEQ ID NO: 32559 - protein, 9 aa, synthetic construct
RIKLGLKRL

SEQ ID NO: 32560 - protein, 10 aa, synthetic construct
LPTITARQRV

SEQ ID NO: 32561 - protein, 9 aa, synthetic construct
FPSRSFSEL

SEQ ID NO: 32562 - protein, 10 aa, synthetic construct
GQPPFPSRSF

SEQ ID NO: 32563 - protein, 11 aa, synthetic construct
PPFPSRSFSEL

SEQ ID NO: 32564 - protein, 9 aa, synthetic construct
HYMPYGLAL

SEQ ID NO: 32565 - protein, 10 aa, synthetic construct
RPQPRGAPRQ

SEQ ID NO: 32566 - protein, 10 aa, synthetic construct
LPHAGYARAW

SEQ ID NO: 32567 - protein, 11 aa, synthetic construct
GPEVDIKGPKL

SEQ ID NO: 32568 - protein, 9 aa, synthetic construct
RLRKENLDL

SEQ ID NO: 32569 - protein, 9 aa, synthetic construct
TLRPRYLEI

SEQ ID NO: 32570 - protein, 9 aa, synthetic construct
AGREEYSAM

SEQ ID NO: 32571 - protein, 11 aa, synthetic construct
AKHPGEPQRGF

SEQ ID NO: 32572 - protein, 10 aa, synthetic construct
LPVALPPAAV

SEQ ID NO: 32573 - protein, 9 aa, synthetic construct
NPVISGKQI

SEQ ID NO: 32574 - protein, 10 aa, synthetic construct
GRPRASTSSS

SEQ ID NO: 32575 - protein, 10 aa, synthetic construct
GGPLMHSHYF

SEQ ID NO: 32576 - protein, 9 aa, synthetic construct
LAGRPHQTL

SEQ ID NO: 32577 - protein, 10 aa, synthetic construct
PPVSSGSGSL

SEQ ID NO: 32578 - protein, 11 aa, synthetic construct
APCQECSGCSL

SEQ ID NO: 32579 - protein, 8 aa, synthetic construct
PPFPSRSF

SEQ ID NO: 32580 - protein, 9 aa, synthetic construct
GPLMHSHYF

SEQ ID NO: 32581 - protein, 10 aa, synthetic construct
QVPGGRETPL

SEQ ID NO: 32582 - protein, 10 aa, synthetic construct
TPPPDGSPNI

SEQ ID NO: 32583 - protein, 10 aa, synthetic construct
RIPMPPSRPQ

SEQ ID NO: 32584 - protein, 9 aa, synthetic construct
MPNENGGTP

SEQ ID NO: 32585 - protein, 10 aa, synthetic construct
NPLDHPRAST

SEQ ID NO: 32586 - protein, 11 aa, synthetic construct
NPLDHPRASTI

SEQ ID NO: 32587 - protein, 10 aa, synthetic construct
KHPGEPQRGF

SEQ ID NO: 32588 - protein, 10 aa, synthetic construct
EPKFLCKVKL

SEQ ID NO: 32589 - protein, 9 aa, synthetic construct
IVNRNRKEM

SEQ ID NO: 32590 - protein, 9 aa, synthetic construct
GPSGICLSF

SEQ ID NO: 32591 - protein, 9 aa, synthetic construct
IPMPPSRPQ

SEQ ID NO: 32592 - protein, 8 aa, synthetic construct
IPMPPSRP

SEQ ID NO: 32593 - protein, 8 aa, synthetic construct
RARASGVM

SEQ ID NO: 32594 - protein, 9 aa, synthetic construct
RSSRRTISF

SEQ ID NO: 32595 - protein, 11 aa, synthetic construct
HYMPYGLALTV

SEQ ID NO: 32596 - protein, 9 aa, synthetic construct
EQDSIRLPL

SEQ ID NO: 32597 - protein, 11 aa, synthetic construct
APRRRSLKENL

SEQ ID NO: 32598 - protein, 11 aa, synthetic construct
FGQPPFPSRSF

SEQ ID NO: 32599 - protein, 10 aa, synthetic construct
MPAVCSPGML

SEQ ID NO: 32600 - protein, 9 aa, synthetic construct
VPGGRETPL

SEQ ID NO: 32601 - protein, 10 aa, synthetic construct
GPSGICLSFL

SEQ ID NO: 32602 - protein, 11 aa, synthetic construct
MPPSRPQPRGA

SEQ ID NO: 32603 - protein, 11 aa, synthetic construct
TPLGELRPEVV

SEQ ID NO: 32604 - protein, 9 aa, synthetic construct
RCNQLLQAL

SEQ ID NO: 32605 - protein, 9 aa, synthetic construct
ESRETGEVL

SEQ ID NO: 32606 - protein, 11 aa, synthetic construct
LDHPRASTIFL

SEQ ID NO: 32607 - protein, 9 aa, synthetic construct
RPRASTSSS

SEQ ID NO: 32608 - protein, 9 aa, synthetic construct
SPGMLPVAL

SEQ ID NO: 32609 - protein, 10 aa, synthetic construct
MPYGLALTVI

SEQ ID NO: 32610 - protein, 10 aa, synthetic construct
NPVISGKQIV

SEQ ID NO: 32611 - protein, 9 aa, synthetic construct
KAFRKVSTL

SEQ ID NO: 32612 - protein, 9 aa, synthetic construct
LPVALPPAA

SEQ ID NO: 32613 - protein, 11 aa, synthetic construct
ILRPEKPALEF

SEQ ID NO: 32614 - protein, 10 aa, synthetic construct
RPHQTLKGTW

SEQ ID NO: 32615 - protein, 10 aa, synthetic construct
HILRPEKPAL

SEQ ID NO: 32616 - protein, 9 aa, synthetic construct
QPQSYQAEI

SEQ ID NO: 32617 - protein, 10 aa, synthetic construct
KPTHSLQRRI

SEQ ID NO: 32618 - protein, 9 aa, synthetic construct
MPYGLALTV

SEQ ID NO: 32619 - protein, 11 aa, synthetic construct
SHILRPEKPAL

SEQ ID NO: 32620 - protein, 11 aa, synthetic construct
VCSPGMLPVAL

SEQ ID NO: 32621 - protein, 8 aa, synthetic construct
VPILTHTL

SEQ ID NO: 32622 - protein, 9 aa, synthetic construct
VPILTHTLT

SEQ ID NO: 32623 - protein, 9 aa, synthetic construct
SPVLLIMSF

SEQ ID NO: 32624 - protein, 10 aa, synthetic construct
RPEKPALEFK

SEQ ID NO: 32625 - protein, 9 aa, synthetic construct
LPHAGYARA

SEQ ID NO: 32626 - protein, 11 aa, synthetic construct
AQPPGRRRELL

SEQ ID NO: 32627 - protein, 10 aa, synthetic construct
AQPPGRRREL

SEQ ID NO: 32628 - protein, 9 aa, synthetic construct
SCHPYRSAF

SEQ ID NO: 32629 - protein, 9 aa, synthetic construct
HPYRSAFYI

SEQ ID NO: 32630 - protein, 8 aa, synthetic construct
RPQPRGAP

SEQ ID NO: 32631 - protein, 10 aa, synthetic construct
HPYRSAFYIL

SEQ ID NO: 32632 - protein, 10 aa, synthetic construct
LRPEKPALEF

SEQ ID NO: 32633 - protein, 9 aa, synthetic construct
TPKMCPLEW

SEQ ID NO: 32634 - protein, 9 aa, synthetic construct
APMCFLANV

SEQ ID NO: 32635 - protein, 9 aa, synthetic construct
RVTDIPQGM

SEQ ID NO: 32636 - protein, 8 aa, synthetic construct
AGRPHQTL

SEQ ID NO: 32637 - protein, 9 aa, synthetic construct
LPPVTLDQF

SEQ ID NO: 32638 - protein, 9 aa, synthetic construct
MPCDFLIPV

SEQ ID NO: 32639 - protein, 9 aa, synthetic construct
KPKLAHFAW

SEQ ID NO: 32640 - protein, 8 aa, synthetic construct
KPKLAHFA

SEQ ID NO: 32641 - protein, 11 aa, synthetic construct
MPKVDLKGPEV

SEQ ID NO: 32642 - protein, 8 aa, synthetic construct
RPRASTSS

SEQ ID NO: 32643 - protein, 9 aa, synthetic construct
HPGEPQRGF

SEQ ID NO: 32644 - protein, 11 aa, synthetic construct
GPSGICLSFLL

SEQ ID NO: 32645 - protein, 11 aa, synthetic construct
SRIPMPPSRPQ

SEQ ID NO: 32646 - protein, 9 aa, synthetic construct
NRNRKEMLL

SEQ ID NO: 32647 - protein, 8 aa, synthetic construct
NRNRKEML

SEQ ID NO: 32648 - protein, 10 aa, synthetic construct
TAKLENIATL

SEQ ID NO: 32649 - protein, 8 aa, synthetic construct
RLVSKGTL

SEQ ID NO: 32650 - protein, 10 aa, synthetic construct
QALKLVITAL

SEQ ID NO: 32651 - protein, 9 aa, synthetic construct
SFVSKQPTL

SEQ ID NO: 32652 - protein, 8 aa, synthetic construct
VISMRCML

SEQ ID NO: 32653 - protein, 9 aa, synthetic construct
HLFSIRAIM

SEQ ID NO: 32654 - protein, 9 aa, synthetic construct
CWNSHGPSL

SEQ ID NO: 32655 - protein, 8 aa, synthetic construct
KGHRVHEL

SEQ ID NO: 32656 - protein, 10 aa, synthetic construct
YTMGRALLSL

SEQ ID NO: 32657 - protein, 8 aa, synthetic construct
VNRNRKEM

SEQ ID NO: 32658 - protein, 10 aa, synthetic construct
SRKGHRVHEL

SEQ ID NO: 32659 - protein, 8 aa, synthetic construct
TMILQAVL

SEQ ID NO: 32660 - protein, 8 aa, synthetic construct
LRPEKPAL

SEQ ID NO: 32661 - protein, 9 aa, synthetic construct
QITPKMCPL

SEQ ID NO: 32662 - protein, 10 aa, synthetic construct
ETLRPRYLEI

SEQ ID NO: 32663 - protein, 8 aa, synthetic construct
YTMGRALL

SEQ ID NO: 32664 - protein, 10 aa, synthetic construct
NMLAAKIAVL

SEQ ID NO: 32665 - protein, 9 aa, synthetic construct
LFYTMGRAL

SEQ ID NO: 32666 - protein, 8 aa, synthetic construct
YMPYGLAL

SEQ ID NO: 32667 - protein, 11 aa, synthetic construct
HSLQRRIAQQL

SEQ ID NO: 32668 - protein, 8 aa, synthetic construct
SSRRTISF

SEQ ID NO: 32669 - protein, 9 aa, synthetic construct
SWLLPPVTL

SEQ ID NO: 32670 - protein, 9 aa, synthetic construct
RKGHRVHEL

SEQ ID NO: 32671 - protein, 11 aa, synthetic construct
IFRDRTDIQYL

SEQ ID NO: 32672 - protein, 9 aa, synthetic construct
FYTIMAYTL

SEQ ID NO: 32673 - protein, 9 aa, synthetic construct
DKRLRKENL

SEQ ID NO: 32674 - protein, 9 aa, synthetic construct
LAFQIYETL

SEQ ID NO: 32675 - protein, 9 aa, synthetic construct
LQRRIAQQL

SEQ ID NO: 32676 - protein, 8 aa, synthetic construct
LCKVKLAF

SEQ ID NO: 32677 - protein, 8 aa, synthetic construct
LGDKLYAL

SEQ ID NO: 32678 - protein, 9 aa, synthetic construct
MAVISYLSL

SEQ ID NO: 32679 - protein, 10 aa, synthetic construct
SLQRRIAQQL

SEQ ID NO: 32680 - protein, 9 aa, synthetic construct
VNRNRKEML

SEQ ID NO: 32681 - protein, 9 aa, synthetic construct
MAIIRALNI

SEQ ID NO: 32682 - protein, 10 aa, synthetic construct
WVKGTKISSV

SEQ ID NO: 32683 - protein, 9 aa, synthetic construct
YTMILQAVL

SEQ ID NO: 32684 - protein, 8 aa, synthetic construct
DGKSIKTF

SEQ ID NO: 32685 - protein, 9 aa, synthetic construct
DLNMEFNPL

SEQ ID NO: 32686 - protein, 8 aa, synthetic construct
ETLRPRYL

SEQ ID NO: 32687 - protein, 9 aa, synthetic construct
SFGQVPKQL

SEQ ID NO: 32688 - protein, 9 aa, synthetic construct
FLCKVKLAF

SEQ ID NO: 32689 - protein, 8 aa, synthetic construct
TLAEHREL

SEQ ID NO: 32690 - protein, 9 aa, synthetic construct
LDHPRASTI

SEQ ID NO: 32691 - protein, 9 aa, synthetic construct
DFQKKIAKI

SEQ ID NO: 32692 - protein, 11 aa, synthetic construct
YETLRPRYLEI

SEQ ID NO: 32693 - protein, 11 aa, synthetic construct
DLKKRIESLIN

SEQ ID NO: 32694 - protein, 9 aa, synthetic construct
LAPEKHYEI

SEQ ID NO: 32695 - protein, 8 aa, synthetic construct
FVSKQPTL

SEQ ID NO: 32696 - protein, 9 aa, synthetic construct
NQLLQALKL

SEQ ID NO: 32697 - protein, 9 aa, synthetic construct
YETLRPRYL

SEQ ID NO: 32698 - protein, 8 aa, synthetic construct
HLFRGLRL

SEQ ID NO: 32699 - protein, 9 aa, synthetic construct
HLNTRYGAV

SEQ ID NO: 32700 - protein, 8 aa, synthetic construct
AFRKVSTL

SEQ ID NO: 32701 - protein, 8 aa, synthetic construct
FQKKIAKI

SEQ ID NO: 32702 - protein, 9 aa, synthetic construct
EDKPKLAHF

SEQ ID NO: 32703 - protein, 8 aa, synthetic construct
MLAAKIAV

SEQ ID NO: 32704 - protein, 9 aa, synthetic construct
GRETPLGEL

SEQ ID NO: 32705 - protein, 9 aa, synthetic construct
RRRSLKENL

SEQ ID NO: 32706 - protein, 8 aa, synthetic construct
RRSLKENL

SEQ ID NO: 32707 - protein, 9 aa, synthetic construct
RRSLKENLV

SEQ ID NO: 32708 - protein, 10 aa, synthetic construct
TRYGAVIKRL

SEQ ID NO: 32709 - protein, 10 aa, synthetic construct
SRETGEVLSM

SEQ ID NO: 32710 - protein, 10 aa, synthetic construct
GRVTDIPQGM

SEQ ID NO: 32711 - protein, 9 aa, synthetic construct
ERSDSDQVM

SEQ ID NO: 32712 - protein, 11 aa, synthetic construct
KRIESLINRDY

SEQ ID NO: 32713 - protein, 9 aa, synthetic construct
FHNFPSIVM

SEQ ID NO: 32714 - protein, 9 aa, synthetic construct
TRYGAVIKR

SEQ ID NO: 32715 - protein, 8 aa, synthetic construct
QRRIAQQL

SEQ ID NO: 32716 - protein, 11 aa, synthetic construct
GRSWLLPPVTL

SEQ ID NO: 32717 - protein, 10 aa, synthetic construct
SERSDSDQVM

SEQ ID NO: 32718 - protein, 9 aa, synthetic construct
IRALNIAHL

SEQ ID NO: 32719 - protein, 8 aa, synthetic construct
RRTISFRM

SEQ ID NO: 32720 - protein, 10 aa, synthetic construct
KRSSRRTISF

SEQ ID NO: 32721 - protein, 9 aa, synthetic construct
SRIKLGLKR

SEQ ID NO: 32722 - protein, 10 aa, synthetic construct
FRDRTDIQYL

SEQ ID NO: 32723 - protein, 11 aa, synthetic construct
MRFSSEAGHVL

SEQ ID NO: 32724 - protein, 10 aa, synthetic construct
RDRTDIQYLI

SEQ ID NO: 32725 - protein, 9 aa, synthetic construct
MSNPPVRAR

SEQ ID NO: 32726 - protein, 9 aa, synthetic construct
KRIESLINR

SEQ ID NO: 32727 - protein, 9 aa, synthetic construct
DRDNASLCF

SEQ ID NO: 32728 - protein, 9 aa, synthetic construct
FYTMGRALL

SEQ ID NO: 32729 - protein, 9 aa, synthetic construct
MRFSSEAGH

SEQ ID NO: 32730 - protein, 9 aa, synthetic construct
CHPYRSAFY

SEQ ID NO: 32731 - protein, 9 aa, synthetic construct
NATGVAKQF

SEQ ID NO: 32732 - protein, 10 aa, synthetic construct
THYMPYGLAL

SEQ ID NO: 32733 - protein, 9 aa, synthetic construct
AHLFSIRAI

SEQ ID NO: 32734 - protein, 10 aa, synthetic construct
CRNLPDRDTF

SEQ ID NO: 32735 - protein, 9 aa, synthetic construct
ARASGVMSA

SEQ ID NO: 32736 - protein, 9 aa, synthetic construct
WRRLDGSQL

SEQ ID NO: 32737 - protein, 9 aa, synthetic construct
SRSNGRRAV

SEQ ID NO: 32738 - protein, 9 aa, synthetic construct
IRAIMWHVI

SEQ ID NO: 32739 - protein, 9 aa, synthetic construct
SRIPMPPSR

SEQ ID NO: 32740 - protein, 9 aa, synthetic construct
HYFLGGTGL

SEQ ID NO: 32741 - protein, 9 aa, synthetic construct
KTLAEHREL

SEQ ID NO: 32742 - protein, 9 aa, synthetic construct
SRRGQFAEH

SEQ ID NO: 32743 - protein, 9 aa, synthetic construct
KHLFRGLRL

SEQ ID NO: 32744 - protein, 9 aa, synthetic construct
VRARASGVM

SEQ ID NO: 32745 - protein, 11 aa, synthetic construct
SSERSDSDQVM

SEQ ID NO: 32746 - protein, 9 aa, synthetic construct
SKLDQEVAL

SEQ ID NO: 32747 - protein, 9 aa, synthetic construct
ITFGCSVEF

SEQ ID NO: 32748 - protein, 9 aa, synthetic construct
KRLVSKGTL

SEQ ID NO: 32749 - protein, 9 aa, synthetic construct
EKPDKCEEY

SEQ ID NO: 32750 - protein, 9 aa, synthetic construct
DRTDIQYLI

SEQ ID NO: 32751 - protein, 8 aa, synthetic construct
DRTDIQYL

SEQ ID NO: 32752 - protein, 9 aa, synthetic construct
KSTSVTYTL

SEQ ID NO: 32753 - protein, 8 aa, synthetic construct
RRLDGSQL

SEQ ID NO: 32754 - protein, 9 aa, synthetic construct
SRRTISFRM

SEQ ID NO: 32755 - protein, 9 aa, synthetic construct
YFLLATMAY

SEQ ID NO: 32756 - protein, 9 aa, synthetic construct
MRMDFQKKI

SEQ ID NO: 32757 - protein, 10 aa, synthetic construct
SRIKLGLKRL

SEQ ID NO: 32758 - protein, 9 aa, synthetic construct
FYSKLDQEV

SEQ ID NO: 32759 - protein, 9 aa, synthetic construct
AKLENIATL

SEQ ID NO: 32760 - protein, 9 aa, synthetic construct
LRSEGLITK

SEQ ID NO: 32761 - protein, 10 aa, synthetic construct
FHYFLGGTGL

SEQ ID NO: 32762 - protein, 10 aa, synthetic construct
IYETLRPRYL

SEQ ID NO: 32763 - protein, 11 aa, synthetic construct
FYVTLAGSEYF

SEQ ID NO: 32764 - protein, 10 aa, synthetic construct
LYTHEEYISF

SEQ ID NO: 32765 - protein, 8 aa, synthetic construct
FYTMGRAL

SEQ ID NO: 32766 - protein, 8 aa, synthetic construct
THEEYISF

SEQ ID NO: 32767 - protein, 9 aa, synthetic construct
HYGSSAYCL

SEQ ID NO: 32768 - protein, 11 aa, synthetic construct
FYTIMAYTLTY

SEQ ID NO: 32769 - protein, 9 aa, synthetic construct
IWAMAVISY

SEQ ID NO: 32770 - protein, 11 aa, synthetic construct
FYSKLDQEVAL

SEQ ID NO: 32771 - protein, 9 aa, synthetic construct
QYLVPILTH

SEQ ID NO: 32772 - protein, 15 aa, synthetic construct
VTYTLTIVPSSASAY

SEQ ID NO: 32773 - protein, 15 aa, synthetic construct
PQIILSGSQLAPEKH

SEQ ID NO: 32774 - protein, 15 aa, synthetic construct
RSLKENLVPQINLAS

SEQ ID NO: 32775 - protein, 15 aa, synthetic construct
NPPVRARASGVMSAP

SEQ ID NO: 32776 - protein, 15 aa, synthetic construct
VPDYLMYSAVSGSEK

SEQ ID NO: 32777 - protein, 15 aa, synthetic construct
ETGEVLSMKRMVHDG

SEQ ID NO: 32778 - protein, 15 aa, synthetic construct
LNMEFNPLDHPRAST

SEQ ID NO: 32779 - protein, 15 aa, synthetic construct
DFEPKFLCKVKLAFK

SEQ ID NO: 32780 - protein, 15 aa, synthetic construct
PTMAIIRALNIAHLI

SEQ ID NO: 32781 - protein, 15 aa, synthetic construct
PTPPTMAIIRALNIA

SEQ ID NO: 32782 - protein, 15 aa, synthetic construct
TNTLAKANKWTSHNV

SEQ ID NO: 32783 - protein, 15 aa, synthetic construct
TLGENIANNGGLKAA

SEQ ID NO: 32784 - protein, 15 aa, synthetic construct
GHSLQRHHSVEAAGR

SEQ ID NO: 32785 - protein, 15 aa, synthetic construct
PMCFLANVAHANRVR

SEQ ID NO: 32786 - protein, 15 aa, synthetic construct
TLTIVPSSASAYVSE

SEQ ID NO: 32787 - protein, 15 aa, synthetic construct
ELPLHLNTRYGAVIK

SEQ ID NO: 32788 - protein, 15 aa, synthetic construct
SEMMSNPPVRARASG

SEQ ID NO: 32789 - protein, 15 aa, synthetic construct
HRELPLHLNTRYGAV

SEQ ID NO: 32790 - protein, 15 aa, synthetic construct
SLKENLVPQINLASS

SEQ ID NO: 32791 - protein, 15 aa, synthetic construct
QTYWLDPAKTLAEHR

SEQ ID NO: 32792 - protein, 15 aa, synthetic construct
RELPLHLNTRYGAVI

SEQ ID NO: 32793 - protein, 15 aa, synthetic construct
GKAFRKVSTLNTHKA

SEQ ID NO: 32794 - protein, 15 aa, synthetic construct
MAIIRALNIAHLIDG

SEQ ID NO: 32795 - protein, 15 aa, synthetic construct
PPTMAIIRALNIAHL

SEQ ID NO: 32796 - protein, 15 aa, synthetic construct
HLFRGLRLNGDLLAQ

SEQ ID NO: 32797 - protein, 15 aa, synthetic construct
IAPMCFLANVAHANR

SEQ ID NO: 32798 - protein, 15 aa, synthetic construct
RTNTLAKANKWTSHN

SEQ ID NO: 32799 - protein, 15 aa, synthetic construct
EEYISFVLNSGSGLS

SEQ ID NO: 32800 - protein, 15 aa, synthetic construct
LPLHLNTRYGAVIKR

SEQ ID NO: 32801 - protein, 15 aa, synthetic construct
EKHYEISRDGRLRSR

SEQ ID NO: 32802 - protein, 15 aa, synthetic construct
NIANNGGLKAAYRAY

SEQ ID NO: 32803 - protein, 15 aa, synthetic construct
ENIANNGGLKAAYRA

SEQ ID NO: 32804 - protein, 15 aa, synthetic construct
EKIKVLLNIIQDLEK

SEQ ID NO: 32805 - protein, 15 aa, synthetic construct
SASFVSKQPTLQAAE

SEQ ID NO: 32806 - protein, 15 aa, synthetic construct
SIKTFKESPKQILDP

SEQ ID NO: 32807 - protein, 15 aa, synthetic construct
SAIQEIEMHADNPAA

SEQ ID NO: 32808 - protein, 15 aa, synthetic construct
LKENLVPQINLASSF

SEQ ID NO: 32809 - protein, 15 aa, synthetic construct
AKRYHMDASGEAVRE

SEQ ID NO: 32810 - protein, 15 aa, synthetic construct
LDQEVALLGSYPVDD

SEQ ID NO: 32811 - protein, 15 aa, synthetic construct
SQLAPEKHYEISRDG

SEQ ID NO: 32812 - protein, 15 aa, synthetic construct
PDALTGNVNMLAAKI

SEQ ID NO: 32813 - protein, 15 aa, synthetic construct
DISSNAAILGRQPPN

SEQ ID NO: 32814 - protein, 15 aa, synthetic construct
FRGLRLNGDLLAQEA

SEQ ID NO: 32815 - protein, 15 aa, synthetic construct
RGLRLNGDLLAQEAQ

SEQ ID NO: 32816 - protein, 15 aa, synthetic construct
PEKHYEISRDGRLRS

SEQ ID NO: 32817 - protein, 15 aa, synthetic construct
LPTITARQRVWRAFE

SEQ ID NO: 32818 - protein, 15 aa, synthetic construct
RSWQPVSRIPMPPSR

SEQ ID NO: 32819 - protein, 15 aa, synthetic construct
NNGGLKAAYRAYQNW

SEQ ID NO: 32820 - protein, 15 aa, synthetic construct
KKRIESLINRDYMER

SEQ ID NO: 32821 - protein, 15 aa, synthetic construct
RHTLGENIANNGGLK

SEQ ID NO: 32822 - protein, 15 aa, synthetic construct
KIIIVNRNRKEMLLN

SEQ ID NO: 32823 - protein, 15 aa, synthetic construct
KGTKISSVDRILTAL

SEQ ID NO: 32824 - protein, 15 aa, synthetic construct
SLNLLPEAKHPGEPQ

SEQ ID NO: 32825 - protein, 15 aa, synthetic construct
KRYHMDASGEAVRET

SEQ ID NO: 32826 - protein, 15 aa, synthetic construct
GIQVLPDGRVTDIPQ

SEQ ID NO: 32827 - protein, 15 aa, synthetic construct
PRRRSLKENLVPQIN

SEQ ID NO: 32828 - protein, 15 aa, synthetic construct
GSQLAPEKHYEISRD

SEQ ID NO: 32829 - protein, 15 aa, synthetic construct
PNDISSNAAILGRQP

SEQ ID NO: 32830 - protein, 15 aa, synthetic construct
NKWTSHNVTVVQRTN

SEQ ID NO: 32831 - protein, 15 aa, synthetic construct
IKSLFHNFPSIVMPN

SEQ ID NO: 32832 - protein, 15 aa, synthetic construct
LGENIANNGGLKAAY

SEQ ID NO: 32833 - protein, 15 aa, synthetic construct
ANNGGLKAAYRAYQN

SEQ ID NO: 32834 - protein, 15 aa, synthetic construct
KGIQVLPDGRVTDIP

SEQ ID NO: 32835 - protein, 15 aa, synthetic construct
YISFVLNSGSGLSHD

SEQ ID NO: 32836 - protein, 15 aa, synthetic construct
EPQRGFKPKTRTPEE

SEQ ID NO: 32837 - protein, 15 aa, synthetic construct
DFQKKIAKINVGKRI

SEQ ID NO: 32838 - protein, 15 aa, synthetic construct
TSHNVTVVQRTNTQP

SEQ ID NO: 32839 - protein, 15 aa, synthetic construct
YVTFSPNGTELLVSM

SEQ ID NO: 32840 - protein, 15 aa, synthetic construct
RGQFAEHQKIHTGVK

SEQ ID NO: 32841 - protein, 15 aa, synthetic construct
ENIANNGGLKAAYRV

SEQ ID NO: 32842 - protein, 15 aa, synthetic construct
PKSLNLLPEAKHPGE

SEQ ID NO: 32843 - protein, 15 aa, synthetic construct
ISFVLNSGSGLSHDY

SEQ ID NO: 32844 - protein, 15 aa, synthetic construct
VIPNDISSNAAILGR

SEQ ID NO: 32845 - protein, 15 aa, synthetic construct
CGKAFRKVSTLNTHK

SEQ ID NO: 32846 - protein, 15 aa, synthetic construct
LKRLVSKGTLVQTKG

SEQ ID NO: 32847 - protein, 15 aa, synthetic construct
HTLGENIANNGGLKA

SEQ ID NO: 32848 - protein, 15 aa, synthetic construct
DQEVALLGSYPVDDG

SEQ ID NO: 32849 - protein, 15 aa, synthetic construct
LSGSQLAPEKHYEIS

SEQ ID NO: 32850 - protein, 15 aa, synthetic construct
QIISLMDKRLRKENL

SEQ ID NO: 32851 - protein, 15 aa, synthetic construct
KSLNLLPEAKHPGEP

SEQ ID NO: 32852 - protein, 15 aa, synthetic construct
NSRIKLGLKRLVSKG

SEQ ID NO: 32853 - protein, 15 aa, synthetic construct
KAKRYHMDASGEAVR

SEQ ID NO: 32854 - protein, 15 aa, synthetic construct
FIKSLFHNFPSIVMP

SEQ ID NO: 32855 - protein, 15 aa, synthetic construct
TMAIIRALNIAHLID

SEQ ID NO: 32856 - protein, 15 aa, synthetic construct
KIKVLLNIIQDLEKA

SEQ ID NO: 32857 - protein, 15 aa, synthetic construct
SHNVTVVQRTNTQPF

SEQ ID NO: 32858 - protein, 15 aa, synthetic construct
GENIANNGGLKAAYR

SEQ ID NO: 32859 - protein, 15 aa, synthetic construct
KHYEISRDGRLRSRS

SEQ ID NO: 32860 - protein, 15 aa, synthetic construct
SSSLKRSSRRTISFR

SEQ ID NO: 32861 - protein, 15 aa, synthetic construct
LSHSSKIIIVNRNRK

SEQ ID NO: 32862 - protein, 15 aa, synthetic construct
RRTISFRMKPKKENS

SEQ ID NO: 32863 - protein, 15 aa, synthetic construct
EPKFLCKVKLAFKCD

SEQ ID NO: 32864 - protein, 15 aa, synthetic construct
RRGQFAEHQKIHTGV

SEQ ID NO: 32865 - protein, 15 aa, synthetic construct
ILQIISLMDKRLRKE

SEQ ID NO: 32866 - protein, 15 aa, synthetic construct
LQIISLMDKRLRKEN

SEQ ID NO: 32867 - protein, 15 aa, synthetic construct
TSGWKVVKTSVQWYA

SEQ ID NO: 32868 - protein, 15 aa, synthetic construct
LILQIISLMDKRLRK

SEQ ID NO: 32869 - protein, 15 aa, synthetic construct
NTRYGAVIKRLSHLE

SEQ ID NO: 32870 - protein, 15 aa, synthetic construct
LAALLKSRSNGRRAV

SEQ ID NO: 32871 - protein, 15 aa, synthetic construct
NVDSEMMSNPPVRAR

SEQ ID NO: 32872 - protein, 15 aa, synthetic construct
VRSEFAMAGHENLSH

SEQ ID NO: 32873 - protein, 15 aa, synthetic construct
HHSVEAAGRPRASTS

SEQ ID NO: 32874 - protein, 15 aa, synthetic construct
CFLANVAHANRVRVG

SEQ ID NO: 32875 - protein, 15 aa, synthetic construct
FPQIFRDRTDIQYLI

SEQ ID NO: 32876 - protein, 15 aa, synthetic construct
EYISFVLNSGSGLSH

SEQ ID NO: 32877 - protein, 15 aa, synthetic construct
ITVSPNEKHLFRGLR

SEQ ID NO: 32878 - protein, 15 aa, synthetic construct
SSKIIIVNRNRKEML

SEQ ID NO: 32879 - protein, 15 aa, synthetic construct
GTKISSVDRILTALA

SEQ ID NO: 32880 - protein, 15 aa, synthetic construct
LNLLPEAKHPGEPQR

SEQ ID NO: 32881 - protein, 15 aa, synthetic construct
GEEVEKSTSVTYTLT

SEQ ID NO: 32882 - protein, 15 aa, synthetic construct
MCFLANVAHANRVRV

SEQ ID NO: 32883 - protein, 15 aa, synthetic construct
HSLQRHHSVEAAGRP

SEQ ID NO: 32884 - protein, 15 aa, synthetic construct
APMCFLANVAHANRV

SEQ ID NO: 32885 - protein, 15 aa, synthetic construct
IIIVNRNRKEMLLNS

SEQ ID NO: 32886 - protein, 15 aa, synthetic construct
FPQIILSGSQLAPEK

SEQ ID NO: 32887 - protein, 15 aa, synthetic construct
FVSSFGQVPKQLFTK

SEQ ID NO: 32888 - protein, 15 aa, synthetic construct
NNSRIKLGLKRLVSK

SEQ ID NO: 32889 - protein, 15 aa, synthetic construct
HSSKIIIVNRNRKEM

SEQ ID NO: 32890 - protein, 15 aa, synthetic construct
QKKGIQVLPDGRVTD

SEQ ID NO: 32891 - protein, 15 aa, synthetic construct
IQEIEMHADNPAAIQ

SEQ ID NO: 32892 - protein, 15 aa, synthetic construct
RRRSLKENLVPQINL

SEQ ID NO: 32893 - protein, 15 aa, synthetic construct
NIANNGGLKAAYRVW

SEQ ID NO: 32894 - protein, 15 aa, synthetic construct
LNTRYGAVIKRLSHL

SEQ ID NO: 32895 - protein, 15 aa, synthetic construct
GLKRLVSKGTLVQTK

SEQ ID NO: 32896 - protein, 15 aa, synthetic construct
VKGTKISSVDRILTA

SEQ ID NO: 32897 - protein, 15 aa, synthetic construct
KEKYTLEQALLSAIQ

SEQ ID NO: 32898 - protein, 15 aa, synthetic construct
PQIFRDRTDIQYLIP

SEQ ID NO: 32899 - protein, 15 aa, synthetic construct
KSLFHNFPSIVMPNE

SEQ ID NO: 32900 - protein, 15 aa, synthetic construct
QEKIKVLLNIIQDLE

SEQ ID NO: 32901 - protein, 15 aa, synthetic construct
VDSEMMSNPPVRARA

SEQ ID NO: 32902 - protein, 15 aa, synthetic construct
AIQEIEMHADNPAAI

SEQ ID NO: 32903 - protein, 15 aa, synthetic construct
RQPPNVTSNSGILGV

SEQ ID NO: 32904 - protein, 15 aa, synthetic construct
SKIIIVNRNRKEMLL

SEQ ID NO: 32905 - protein, 15 aa, synthetic construct
ANKWTSHNVTVVQRT

SEQ ID NO: 32906 - protein, 15 aa, synthetic construct
DSEMMSNPPVRARAS

SEQ ID NO: 32907 - protein, 15 aa, synthetic construct
KENLVPQINLASSFF

SEQ ID NO: 32908 - protein, 15 aa, synthetic construct
IPNDISSNAAILGRQ

SEQ ID NO: 32909 - protein, 15 aa, synthetic construct
RHHSVEAAGRPRAST

SEQ ID NO: 32910 - protein, 15 aa, synthetic construct
RSEFAMAGHENLSHG

SEQ ID NO: 32911 - protein, 15 aa, synthetic construct
NPDALTGNVNMLAAK

SEQ ID NO: 32912 - protein, 15 aa, synthetic construct
KKGIQVLPDGRVTDI

SEQ ID NO: 32913 - protein, 15 aa, synthetic construct
FLLSGYTPYTKPDAI

SEQ ID NO: 32914 - protein, 15 aa, synthetic construct
FLANVAHANRVRVGS

SEQ ID NO: 32915 - protein, 15 aa, synthetic construct
DPRWMLAGRPHQTLK

SEQ ID NO: 32916 - protein, 15 aa, synthetic construct
LTIVPSSASAYVSEE

SEQ ID NO: 32917 - protein, 15 aa, synthetic construct
LFRGLRLNGDLLAQE

SEQ ID NO: 32918 - protein, 15 aa, synthetic construct
SGSQLAPEKHYEISR

SEQ ID NO: 32919 - protein, 15 aa, synthetic construct
KANKWTSHNVTVVQR

SEQ ID NO: 32920 - protein, 15 aa, synthetic construct
SHSSKIIIVNRNRKE

SEQ ID NO: 32921 - protein, 15 aa, synthetic construct
TGEVLSMKRMVHDGT

SEQ ID NO: 32922 - protein, 15 aa, synthetic construct
SRRGQFAEHQKIHTG

SEQ ID NO: 32923 - protein, 15 aa, synthetic construct
DALTGNVNMLAAKIA

SEQ ID NO: 32924 - protein, 15 aa, synthetic construct
RNPDALTGNVNMLAA

SEQ ID NO: 32925 - protein, 15 aa, synthetic construct
QLPGKVKYSKSQAIL

SEQ ID NO: 32926 - protein, 15 aa, synthetic construct
SRRTISFRMKPKKEN

SEQ ID NO: 32927 - protein, 15 aa, synthetic construct
SQLPGKVKYSKSQAI

SEQ ID NO: 32928 - protein, 15 aa, synthetic construct
TYTLTIVPSSASAYV

SEQ ID NO: 32929 - protein, 15 aa, synthetic construct
FQKKIAKINVGKRIA

SEQ ID NO: 32930 - protein, 15 aa, synthetic construct
YTLTIVPSSASAYVS

SEQ ID NO: 32931 - protein, 15 aa, synthetic construct
VSSFGQVPKQLFTKP

SEQ ID NO: 32932 - protein, 15 aa, synthetic construct
SGGLLVFPPAFYGAK

SEQ ID NO: 32933 - protein, 15 aa, synthetic construct
RRSLKENLVPQINLA

SEQ ID NO: 32934 - protein, 15 aa, synthetic construct
KTFKESPKQILDPAA

SEQ ID NO: 32935 - protein, 15 aa, synthetic construct
NDISSNAAILGRQPP

SEQ ID NO: 32936 - protein, 15 aa, synthetic construct
TYVTFSPNGTELLVS

SEQ ID NO: 32937 - protein, 15 aa, synthetic construct
NMEFNPLDHPRASTI

SEQ ID NO: 32938 - protein, 15 aa, synthetic construct
TPPTMAIIRALNIAH

SEQ ID NO: 32939 - protein, 15 aa, synthetic construct
KSIKTFKESPKQILD

SEQ ID NO: 32940 - protein, 15 aa, synthetic construct
IKTFKESPKQILDPA

SEQ ID NO: 32941 - protein, 15 aa, synthetic construct
PNEKHLFRGLRLNGD

SEQ ID NO: 32942 - protein, 15 aa, synthetic construct
REEYSAMRDQYMRTG

SEQ ID NO: 32943 - protein, 15 aa, synthetic construct
DQLLLPHAGYARAWS

SEQ ID NO: 32944 - protein, 15 aa, synthetic construct
QNEAVFMWTAKLENI

SEQ ID NO: 32945 - protein, 15 aa, synthetic construct
MAVISYLSLTCSSPF

SEQ ID NO: 32946 - protein, 15 aa, synthetic construct
QAVLSLSSADARQKA

SEQ ID NO: 32947 - protein, 15 aa, synthetic construct
WAIIKSYDLDPGDGS

SEQ ID NO: 32948 - protein, 15 aa, synthetic construct
PGTVMRFSSEAGHVL

SEQ ID NO: 32949 - protein, 15 aa, synthetic construct
GDGKSIKTFKESPKQ

SEQ ID NO: 32950 - protein, 15 aa, synthetic construct
VVKTSVQWYAPIVPA

SEQ ID NO: 32951 - protein, 15 aa, synthetic construct
SNQEKIKVLLNIIQD

SEQ ID NO: 32952 - protein, 15 aa, synthetic construct
KRIESLINRDYMERD

SEQ ID NO: 32953 - protein, 15 aa, synthetic construct
TVMRFSSEAGHVLRG

SEQ ID NO: 32954 - protein, 15 aa, synthetic construct
MRCMLQFVGREAKYS

SEQ ID NO: 32955 - protein, 15 aa, synthetic construct
GTVMRFSSEAGHVLR

SEQ ID NO: 32956 - protein, 15 aa, synthetic construct
EAVFMWTAKLENIAT

SEQ ID NO: 32957 - protein, 15 aa, synthetic construct
LYALGGYDGQAYLNT

SEQ ID NO: 32958 - protein, 15 aa, synthetic construct
GREEYSAMRDQYMRT

SEQ ID NO: 32959 - protein, 15 aa, synthetic construct
TGNVNMLAAKIAVLS

SEQ ID NO: 32960 - protein, 15 aa, synthetic construct
LAFQIYETLRPRYLE

SEQ ID NO: 32961 - protein, 15 aa, synthetic construct
DLDQTVVSITDVDLI

SEQ ID NO: 32962 - protein, 15 aa, synthetic construct
FDPGTVMRFSSEAGH

SEQ ID NO: 32963 - protein, 15 aa, synthetic construct
DPGTVMRFSSEAGHV

SEQ ID NO: 32964 - protein, 15 aa, synthetic construct
QAPFHYFLGGTGLHP

SEQ ID NO: 32965 - protein, 15 aa, synthetic construct
ESGGLLVFPPAFYGA

SEQ ID NO: 32966 - protein, 15 aa, synthetic construct
LIKSTILGFVSSFGQ

SEQ ID NO: 32967 - protein, 15 aa, synthetic construct
QTVVSITDVDLIYQN

SEQ ID NO: 32968 - protein, 15 aa, synthetic construct
STILGFVSSFGQVPK

SEQ ID NO: 32969 - protein, 15 aa, synthetic construct
FRKVSTLNTHKAIHA

SEQ ID NO: 32970 - protein, 15 aa, synthetic construct
KVLLNIIQDLEKARA

SEQ ID NO: 32971 - protein, 15 aa, synthetic construct
ALQYLVPILTHTLTK

SEQ ID NO: 32972 - protein, 15 aa, synthetic construct
VKTSVQWYAPIVPAT

SEQ ID NO: 32973 - protein, 15 aa, synthetic construct
SLFHNFPSIVMPNEN

SEQ ID NO: 32974 - protein, 15 aa, synthetic construct
GDKLYALGGYDGQAY

SEQ ID NO: 32975 - protein, 15 aa, synthetic construct
SKLDQEVALLGSYPV

SEQ ID NO: 32976 - protein, 15 aa, synthetic construct
NQEKIKVLLNIIQDL

SEQ ID NO: 32977 - protein, 15 aa, synthetic construct
SITDVDLIYQNEFLG

SEQ ID NO: 32978 - protein, 15 aa, synthetic construct
ALMIFVAIGFKTKLA

SEQ ID NO: 32979 - protein, 15 aa, synthetic construct
DISWRRLDGSQLPGK

SEQ ID NO: 32980 - protein, 15 aa, synthetic construct
YDPKLQMQEGVRSEF

SEQ ID NO: 32981 - protein, 15 aa, synthetic construct
QEVALLGSYPVDDGC

SEQ ID NO: 32982 - protein, 15 aa, synthetic construct
LSFLLSGYTPYTKPD

SEQ ID NO: 32983 - protein, 15 aa, synthetic construct
LKKRIESLINRDYME

SEQ ID NO: 32984 - protein, 15 aa, synthetic construct
SFLLSGYTPYTKPDA

SEQ ID NO: 32985 - protein, 15 aa, synthetic construct
KSTILGFVSSFGQVP

SEQ ID NO: 32986 - protein, 15 aa, synthetic construct
QYLVPILTHTLTKQD

SEQ ID NO: 32987 - protein, 15 aa, synthetic construct
EVALLGSYPVDDGCR

SEQ ID NO: 32988 - protein, 15 aa, synthetic construct
NGTELLVSMGGEQVY

SEQ ID NO: 32989 - protein, 15 aa, synthetic construct
TQDQLLLPHAGYARA

SEQ ID NO: 32990 - protein, 15 aa, synthetic construct
GKSIKTFKESPKQIL

SEQ ID NO: 32991 - protein, 15 aa, synthetic construct
VRETLQFKAQDLLRA

SEQ ID NO: 32992 - protein, 15 aa, synthetic construct
LQYLVPILTHTLTKQ

SEQ ID NO: 32993 - protein, 15 aa, synthetic construct
GESGGLLVFPPAFYG

SEQ ID NO: 32994 - protein, 15 aa, synthetic construct
GMQMFFYVTLAGSEY

SEQ ID NO: 32995 - protein, 15 aa, synthetic construct
THSLQRRIAQQLPRQ

SEQ ID NO: 32996 - protein, 15 aa, synthetic construct
IKSTILGFVSSFGQV

SEQ ID NO: 32997 - protein, 15 aa, synthetic construct
TELLVSMGGEQVYLF

SEQ ID NO: 32998 - protein, 15 aa, synthetic construct
RCMLQFVGREAKYSG

SEQ ID NO: 32999 - protein, 15 aa, synthetic construct
YALGGYDGQAYLNTV

SEQ ID NO: 33000 - protein, 15 aa, synthetic construct
DKLYALGGYDGQAYL

SEQ ID NO: 33001 - protein, 15 aa, synthetic construct
LYTHEEYISFVLNSG

SEQ ID NO: 33002 - protein, 15 aa, synthetic construct
PDYLMYSAVSGSEKN

SEQ ID NO: 33003 - protein, 15 aa, synthetic construct
AYTLTYISSVLQANL

SEQ ID NO: 33004 - protein, 15 aa, synthetic construct
AVRETLQFKAQDLLR

SEQ ID NO: 33005 - protein, 15 aa, synthetic construct
LLGDKLYALGGYDGQ

SEQ ID NO: 33006 - protein, 15 aa, synthetic construct
LQNEAVFMWTAKLEN

SEQ ID NO: 33007 - protein, 15 aa, synthetic construct
GVILYEALFGQPPFP

SEQ ID NO: 33008 - protein, 15 aa, synthetic construct
DCNVPDYLMYSAVSG

SEQ ID NO: 33009 - protein, 15 aa, synthetic construct
AIIKSYDLDPGDGSL

SEQ ID NO: 33010 - protein, 15 aa, synthetic construct
DRTDIQYLIPCAIDQ

SEQ ID NO: 33011 - protein, 15 aa, synthetic construct
VNCIDWVKGTKISSV

SEQ ID NO: 33012 - protein, 15 aa, synthetic construct
DLKKRIESLINRDYM

SEQ ID NO: 33013 - protein, 15 aa, synthetic construct
KLYALGGYDGQAYLN

SEQ ID NO: 33014 - protein, 15 aa, synthetic construct
WAMAVISYLSLTCSS

SEQ ID NO: 33015 - protein, 15 aa, synthetic construct
IWAMAVISYLSLTCS

SEQ ID NO: 33016 - protein, 15 aa, synthetic construct
GTALMIFVAIGFKTK

SEQ ID NO: 33017 - protein, 15 aa, synthetic construct
QDQLILQIISLMDKR

SEQ ID NO: 33018 - protein, 15 aa, synthetic construct
AFRKVSTLNTHKAIH

SEQ ID NO: 33019 - protein, 15 aa, synthetic construct
DQTVVSITDVDLIYQ

SEQ ID NO: 33020 - protein, 15 aa, synthetic construct
NCIDWVKGTKISSVD

SEQ ID NO: 33021 - protein, 15 aa, synthetic construct
ALVNCIDWVKGTKIS

SEQ ID NO: 33022 - protein, 15 aa, synthetic construct
DPKLQMQEGVRSEFA

SEQ ID NO: 33023 - protein, 15 aa, synthetic construct
VHLAFQIYETLRPRY

SEQ ID NO: 33024 - protein, 15 aa, synthetic construct
GWAIIKSYDLDPGDG

SEQ ID NO: 33025 - protein, 15 aa, synthetic construct
TDVDLIYQNEFLGCT

SEQ ID NO: 33026 - protein, 15 aa, synthetic construct
EFFIHGFSVLESPVL

SEQ ID NO: 33027 - protein, 15 aa, synthetic construct
LVHLAFQIYETLRPR

SEQ ID NO: 33028 - protein, 15 aa, synthetic construct
SMRCMLQFVGREAKY

SEQ ID NO: 33029 - protein, 15 aa, synthetic construct
KFSIELFYTMGRALL

SEQ ID NO: 33030 - protein, 15 aa, synthetic construct
SEQPQSYQAEIIELR

SEQ ID NO: 33031 - protein, 15 aa, synthetic construct
LFHNFPSIVMPNENG

SEQ ID NO: 33032 - protein, 15 aa, synthetic construct
LTGNVNMLAAKIAVL

SEQ ID NO: 33033 - protein, 15 aa, synthetic construct
GTELLVSMGGEQVYL

SEQ ID NO: 33034 - protein, 15 aa, synthetic construct
KLDQEVALLGSYPVD

SEQ ID NO: 33035 - protein, 15 aa, synthetic construct
ALNIAHLIDGILVAP

SEQ ID NO: 33036 - protein, 15 aa, synthetic construct
ITDVDLIYQNEFLGC

SEQ ID NO: 33037 - protein, 15 aa, synthetic construct
PDISWRRLDGSQLPG

SEQ ID NO: 33038 - protein, 15 aa, synthetic construct
KTSVQWYAPIVPATQ

SEQ ID NO: 33039 - protein, 15 aa, synthetic construct
DVDLIYQNEFLGCTD

SEQ ID NO: 33040 - protein, 15 aa, synthetic construct
AMAVISYLSLTCSSP

SEQ ID NO: 33041 - protein, 15 aa, synthetic construct
TALMIFVAIGFKTKL

SEQ ID NO: 33042 - protein, 15 aa, synthetic construct
LGDKLYALGGYDGQA

SEQ ID NO: 33043 - protein, 15 aa, synthetic construct
LQAVLSLSSADARQK

SEQ ID NO: 33044 - protein, 15 aa, synthetic construct
VGTALMIFVAIGFKT

SEQ ID NO: 33045 - protein, 15 aa, synthetic construct
FKFSIELFYTMGRAL

SEQ ID NO: 33046 - protein, 15 aa, synthetic construct
ILQAVLSLSSADARQ

SEQ ID NO: 33047 - protein, 15 aa, synthetic construct
DGKSIKTFKESPKQI

SEQ ID NO: 33048 - protein, 15 aa, synthetic construct
RTDIQYLIPCAIDQD

SEQ ID NO: 33049 - protein, 15 aa, synthetic construct
MAYTLTYISSVLQAN

SEQ ID NO: 33050 - protein, 15 aa, synthetic construct
HLAFQIYETLRPRYL

SEQ ID NO: 33051 - protein, 15 aa, synthetic construct
NEAVFMWTAKLENIA

SEQ ID NO: 33052 - protein, 15 aa, synthetic construct
VMRFSSEAGHVLRGS

SEQ ID NO: 33053 - protein, 15 aa, synthetic construct
NVPDYLMYSAVSGSE

SEQ ID NO: 33054 - protein, 15 aa, synthetic construct
VFKFSIELFYTMGRA

SEQ ID NO: 33055 - protein, 15 aa, synthetic construct
QLILQIISLMDKRLR

SEQ ID NO: 33056 - protein, 15 aa, synthetic construct
LAKANKWTSHNVTVV

SEQ ID NO: 33057 - protein, 15 aa, synthetic construct
AQEFFIHGFSVLESP

SEQ ID NO: 33058 - protein, 15 aa, synthetic construct
ISMRCMLQFVGREAK

SEQ ID NO: 33059 - protein, 15 aa, synthetic construct
LDQTVVSITDVDLIY

SEQ ID NO: 33060 - protein, 15 aa, synthetic construct
RKVSTLNTHKAIHAE

SEQ ID NO: 33061 - protein, 15 aa, synthetic construct
LSAIQEIEMHADNPA

SEQ ID NO: 33062 - protein, 15 aa, synthetic construct
CNVPDYLMYSAVSGS

SEQ ID NO: 33063 - protein, 15 aa, synthetic construct
LVNCIDWVKGTKISS

SEQ ID NO: 33064 - protein, 15 aa, synthetic construct
GQAPFHYFLGGTGLH

SEQ ID NO: 33065 - protein, 15 aa, synthetic construct
WGWAIIKSYDLDPGD

SEQ ID NO: 33066 - protein, 15 aa, synthetic construct
QDQLLLPHAGYARAW

SEQ ID NO: 33067 - protein, 15 aa, synthetic construct
QEFFIHGFSVLESPV

SEQ ID NO: 33068 - protein, 15 aa, synthetic construct
MDFQKKIAKINVGKR

SEQ ID NO: 33069 - protein, 15 aa, synthetic construct
NVNMLAAKIAVLSSS

SEQ ID NO: 33070 - protein, 15 aa, synthetic construct
SNPPVRARASGVMSA

SEQ ID NO: 33071 - protein, 15 aa, synthetic construct
GTGLHPAAPGAPGGR

SEQ ID NO: 33072 - protein, 15 aa, synthetic construct
DGSQLPGKVKYSKSQ

SEQ ID NO: 33073 - protein, 15 aa, synthetic construct
RARASGVMSAPPVRA

SEQ ID NO: 33074 - protein, 15 aa, synthetic construct
YQLIHQGTKMMPCDF

SEQ ID NO: 33075 - protein, 15 aa, synthetic construct
QRTYSSSLKRSSRRT

SEQ ID NO: 33076 - protein, 15 aa, synthetic construct
YTPTSASFVSKQPTL

SEQ ID NO: 33077 - protein, 15 aa, synthetic construct
APFHYFLGGTGLHPA

SEQ ID NO: 33078 - protein, 15 aa, synthetic construct
QNPVSEASDIWAMAV

SEQ ID NO: 33079 - protein, 15 aa, synthetic construct
AATEVLAALLKSRSN

SEQ ID NO: 33080 - protein, 15 aa, synthetic construct
SVQWYAPIVPATQEA

SEQ ID NO: 33081 - protein, 15 aa, synthetic construct
SPGMLPVALPPAAVN

SEQ ID NO: 33082 - protein, 15 aa, synthetic construct
QGGNSTATLEPPTCP

SEQ ID NO: 33083 - protein, 15 aa, synthetic construct
LLSAIQEIEMHADNP

SEQ ID NO: 33084 - protein, 15 aa, synthetic construct
PGMLPVALPPAAVNA

SEQ ID NO: 33085 - protein, 15 aa, synthetic construct
SKQPTLQAAELIDSE

SEQ ID NO: 33086 - protein, 15 aa, synthetic construct
GTRESAGGSPARSLT

SEQ ID NO: 33087 - protein, 15 aa, synthetic construct
PVRARASGVMSAPPV

SEQ ID NO: 33088 - protein, 15 aa, synthetic construct
HNFPSIVMPNENGGT

SEQ ID NO: 33089 - protein, 15 aa, synthetic construct
FHYFLGGTGLHPAAP

SEQ ID NO: 33090 - protein, 15 aa, synthetic construct
TAGREEYSAMRDQYM

SEQ ID NO: 33091 - protein, 15 aa, synthetic construct
LDGSQLPGKVKYSKS

SEQ ID NO: 33092 - protein, 15 aa, synthetic construct
CQGGNSTATLEPPTC

SEQ ID NO: 33093 - protein, 15 aa, synthetic construct
LCQGGNSTATLEPPT

SEQ ID NO: 33094 - protein, 15 aa, synthetic construct
LRYLILGSDVGGGYT

SEQ ID NO: 33095 - protein, 15 aa, synthetic construct
TRESAGGSPARSLTR

SEQ ID NO: 33096 - protein, 15 aa, synthetic construct
SRAAHALSRKGHRVH

SEQ ID NO: 33097 - protein, 15 aa, synthetic construct
FSNQAESMMVPGNAT

SEQ ID NO: 33098 - protein, 15 aa, synthetic construct
LLELQNEAVFMWTAK

SEQ ID NO: 33099 - protein, 15 aa, synthetic construct
TYWLDPAKTLAEHRE

SEQ ID NO: 33100 - protein, 15 aa, synthetic construct
DPSAGRGAEASAAGP

SEQ ID NO: 33101 - protein, 15 aa, synthetic construct
FSSEAGHVLRGSSER

SEQ ID NO: 33102 - protein, 15 aa, synthetic construct
MVPGNATGVAKQFLR

SEQ ID NO: 33103 - protein, 15 aa, synthetic construct
SVTYTLTIVPSSASA

SEQ ID NO: 33104 - protein, 15 aa, synthetic construct
YAPIVPATQEANTGG

SEQ ID NO: 33105 - protein, 15 aa, synthetic construct
SNQAESMMVPGNATG

SEQ ID NO: 33106 - protein, 15 aa, synthetic construct
AGESALPTITARQRV

SEQ ID NO: 33107 - protein, 15 aa, synthetic construct
TFSPNGTELLVSMGG

SEQ ID NO: 33108 - protein, 15 aa, synthetic construct
WTSHNVTVVQRTNTQ

SEQ ID NO: 33109 - protein, 15 aa, synthetic construct
RLVSKGTLVQTKGTG

SEQ ID NO: 33110 - protein, 15 aa, synthetic construct
SAGRGAEASAAGPPG

SEQ ID NO: 33111 - protein, 15 aa, synthetic construct
KWTSHNVTVVQRTNT

SEQ ID NO: 33112 - protein, 15 aa, synthetic construct
QLIHQGTKMMPCDFL

SEQ ID NO: 33113 - protein, 15 aa, synthetic construct
YTMILQAVLSLSSAD

SEQ ID NO: 33114 - protein, 15 aa, synthetic construct
CSPGMLPVALPPAAV

SEQ ID NO: 33115 - protein, 15 aa, synthetic construct
IDWVKGTKISSVDRI

SEQ ID NO: 33116 - protein, 15 aa, synthetic construct
IILSGSQLAPEKHYE

SEQ ID NO: 33117 - protein, 15 aa, synthetic construct
TPGSRAAHALSRKGH

SEQ ID NO: 33118 - protein, 15 aa, synthetic construct
PGSRAAHALSRKGHR

SEQ ID NO: 33119 - protein, 15 aa, synthetic construct
KRLVSKGTLVQTKGT

SEQ ID NO: 33120 - protein, 15 aa, synthetic construct
FVLNSGSGLSHDYAN

SEQ ID NO: 33121 - protein, 15 aa, synthetic construct
PLDHPRASTIFLSKS

SEQ ID NO: 33122 - protein, 15 aa, synthetic construct
RMDFQKKIAKINVGK

SEQ ID NO: 33123 - protein, 15 aa, synthetic construct
QIILSGSQLAPEKHY

SEQ ID NO: 33124 - protein, 15 aa, synthetic construct
GSRAAHALSRKGHRV

SEQ ID NO: 33125 - protein, 15 aa, synthetic construct
MRFSSEAGHVLRGSS

SEQ ID NO: 33126 - protein, 15 aa, synthetic construct
FLGGTGLHPAAPGAP

SEQ ID NO: 33127 - protein, 15 aa, synthetic construct
YFLGGTGLHPAAPGA

SEQ ID NO: 33128 - protein, 15 aa, synthetic construct
LQMQEGVRSEFAMAG

SEQ ID NO: 33129 - protein, 15 aa, synthetic construct
NPLDHPRASTIFLSK

SEQ ID NO: 33130 - protein, 15 aa, synthetic construct
FFIHGFSVLESPVLL

SEQ ID NO: 33131 - protein, 15 aa, synthetic construct
ILSGSQLAPEKHYEI

SEQ ID NO: 33132 - protein, 15 aa, synthetic construct
TQRTYSSSLKRSSRR

SEQ ID NO: 33133 - protein, 15 aa, synthetic construct
NKQVVSSSEQPQSYQ

SEQ ID NO: 33134 - protein, 15 aa, synthetic construct
PPVRARASGVMSAPP

SEQ ID NO: 33135 - protein, 15 aa, synthetic construct
WVKGTKISSVDRILT

SEQ ID NO: 33136 - protein, 15 aa, synthetic construct
PKLQMQEGVRSEFAM

SEQ ID NO: 33137 - protein, 15 aa, synthetic construct
DWVKGTKISSVDRIL

SEQ ID NO: 33138 - protein, 15 aa, synthetic construct
SGAAGGSGSASSNSS

SEQ ID NO: 33139 - protein, 15 aa, synthetic construct
CIDWVKGTKISSVDR

SEQ ID NO: 33140 - protein, 15 aa, synthetic construct
KLRYLILGSDVGGGY

SEQ ID NO: 33141 - protein, 15 aa, synthetic construct
NPVSEASDIWAMAVI

SEQ ID NO: 33142 - protein, 15 aa, synthetic construct
DYLMYSAVSGSEKNS

SEQ ID NO: 33143 - protein, 15 aa, synthetic construct
AGREEYSAMRDQYMR

SEQ ID NO: 33144 - protein, 15 aa, synthetic construct
RDPSAGRGAEASAAG

SEQ ID NO: 33145 - protein, 15 aa, synthetic construct
GDLHTLIIAEAFDDD

SEQ ID NO: 33146 - protein, 15 aa, synthetic construct
QQNPVSEASDIWAMA

SEQ ID NO: 33147 - protein, 15 aa, synthetic construct
LDHPRASTIFLSKSQ

SEQ ID NO: 33148 - protein, 15 aa, synthetic construct
GGDLHTLIIAEAFDD

SEQ ID NO: 33149 - protein, 15 aa, synthetic construct
LELQNEAVFMWTAKL

SEQ ID NO: 33150 - protein, 15 aa, synthetic construct
HSVEAAGRPRASTSS

SEQ ID NO: 33151 - protein, 15 aa, synthetic construct
VCSPGMLPVALPPAA

SEQ ID NO: 33152 - protein, 15 aa, synthetic construct
RYLILGSDVGGGYTA

SEQ ID NO: 33153 - protein, 15 aa, synthetic construct
STSVTYTLTIVPSSA

SEQ ID NO: 33154 - protein, 15 aa, synthetic construct
RAATEVLAALLKSRS

SEQ ID NO: 33155 - protein, 15 aa, synthetic construct
PSAGRGAEASAAGPP

SEQ ID NO: 33156 - protein, 15 aa, synthetic construct
SSEAGHVLRGSSERT

SEQ ID NO: 33157 - protein, 15 aa, synthetic construct
DYTPTSASFVSKQPT

SEQ ID NO: 33158 - protein, 15 aa, synthetic construct
YLILGSDVGGGYTAK

SEQ ID NO: 33159 - protein, 15 aa, synthetic construct
TSVTYTLTIVPSSAS

SEQ ID NO: 33160 - protein, 15 aa, synthetic construct
KLQMQEGVRSEFAMA

SEQ ID NO: 33161 - protein, 15 aa, synthetic construct
TLTYISSVLQANLRD

SEQ ID NO: 33162 - protein, 15 aa, synthetic construct
DCCNYMTELRRQHAR

SEQ ID NO: 33163 - protein, 15 aa, synthetic construct
LNKQVVSSSEQPQSY

SEQ ID NO: 33164 - protein, 15 aa, synthetic construct
VRARASGVMSAPPVR

SEQ ID NO: 33165 - protein, 15 aa, synthetic construct
QPQSYQAEIIELRRT

SEQ ID NO: 33166 - protein, 15 aa, synthetic construct
PFHYFLGGTGLHPAA

SEQ ID NO: 33167 - protein, 15 aa, synthetic construct
ISSNAAILGRQPPNV

SEQ ID NO: 33168 - protein, 15 aa, synthetic construct
KPPVSSGSGSLSSSS

SEQ ID NO: 33169 - protein, 15 aa, synthetic construct
VTFSPNGTELLVSMG

SEQ ID NO: 33170 - protein, 15 aa, synthetic construct
KPHFITSSVEQDSIR

SEQ ID NO: 33171 - protein, 15 aa, synthetic construct
PHFITSSVEQDSIRL

SEQ ID NO: 33172 - protein, 15 aa, synthetic construct
GNVNMLAAKIAVLSS

SEQ ID NO: 33173 - protein, 15 aa, synthetic construct
FHNFPSIVMPNENGG

SEQ ID NO: 33174 - protein, 15 aa, synthetic construct
KLENIATLCFKALEN

SEQ ID NO: 33175 - protein, 15 aa, synthetic construct
PPVSSGSGSLSSSSS

SEQ ID NO: 33176 - protein, 15 aa, synthetic construct
AWSPAEDSRIRLTAR

SEQ ID NO: 33177 - protein, 15 aa, synthetic construct
RESAGGSPARSLTRS

SEQ ID NO: 33178 - protein, 15 aa, synthetic construct
LDCCNYMTELRRQHA

SEQ ID NO: 33179 - protein, 15 aa, synthetic construct
HYFLGGTGLHPAAPG

SEQ ID NO: 33180 - protein, 15 aa, synthetic construct
TSVQWYAPIVPATQE

SEQ ID NO: 33181 - protein, 15 aa, synthetic construct
RFSSEAGHVLRGSSE

SEQ ID NO: 33182 - protein, 15 aa, synthetic construct
PTQRTYSSSLKRSSR

SEQ ID NO: 33183 - protein, 15 aa, synthetic construct
RASGVMSAPPVRALD

SEQ ID NO: 33184 - protein, 15 aa, synthetic construct
ELQNEAVFMWTAKLE

SEQ ID NO: 33185 - protein, 15 aa, synthetic construct
SLQRHHSVEAAGRPR

SEQ ID NO: 33186 - protein, 15 aa, synthetic construct
VQWYAPIVPATQEAN

SEQ ID NO: 33187 - protein, 15 aa, synthetic construct
RLDGSQLPGKVKYSK

SEQ ID NO: 33188 - protein, 15 aa, synthetic construct
EGGDLHTLIIAEAFD

SEQ ID NO: 33189 - protein, 15 aa, synthetic construct
QMQEGVRSEFAMAGH

SEQ ID NO: 33190 - protein, 15 aa, synthetic construct
QWYAPIVPATQEANT

SEQ ID NO: 33191 - protein, 15 aa, synthetic construct
GTTPLQFAIIRERSS

SEQ ID NO: 33192 - protein, 15 aa, synthetic construct
LSSERSDSDQVMPNE

SEQ ID NO: 33193 - protein, 15 aa, synthetic construct
SGSCSSNSSGDALVT

SEQ ID NO: 33194 - protein, 15 aa, synthetic construct
EDLDQTVVSITDVDL

SEQ ID NO: 33195 - protein, 15 aa, synthetic construct
VAPQNGDPDPGASVG

SEQ ID NO: 33196 - protein, 15 aa, synthetic construct
GAKPHFITSSVEQDS

SEQ ID NO: 33197 - protein, 15 aa, synthetic construct
QVLPDGRVTDIPQGM

SEQ ID NO: 33198 - protein, 15 aa, synthetic construct
EYFLLATMAYDRYVA

SEQ ID NO: 33199 - protein, 15 aa, synthetic construct
RAIMWHVIARDFGQS

SEQ ID NO: 33200 - protein, 15 aa, synthetic construct
VLPDGRVTDIPQGMV

SEQ ID NO: 33201 - protein, 15 aa, synthetic construct
KGAKPHFITSSVEQD

SEQ ID NO: 33202 - protein, 15 aa, synthetic construct
LIYQNEFLGCTDRLV

SEQ ID NO: 33203 - protein, 15 aa, synthetic construct
GVDDKFYSKLDQEVA

SEQ ID NO: 33204 - protein, 15 aa, synthetic construct
RVTDIPQGMVTDQFG

SEQ ID NO: 33205 - protein, 15 aa, synthetic construct
VDDKFYSKLDQEVAL

SEQ ID NO: 33206 - protein, 15 aa, synthetic construct
TRNTCTTGITDTPPP

SEQ ID NO: 33207 - protein, 15 aa, synthetic construct
GSGSASSNSSGDALV

SEQ ID NO: 33208 - protein, 15 aa, synthetic construct
ALLSAIQEIEMHADN

SEQ ID NO: 33209 - protein, 15 aa, synthetic construct
GETCLLDILDTAGRE

SEQ ID NO: 33210 - protein, 15 aa, synthetic construct
DIPQGMVTDQFGMIG

SEQ ID NO: 33211 - protein, 15 aa, synthetic construct
YARAWSPAEDSRIRL

SEQ ID NO: 33212 - protein, 15 aa, synthetic construct
AKPHFITSSVEQDSI

SEQ ID NO: 33213 - protein, 15 aa, synthetic construct
ARAWSPAEDSRIRLT

SEQ ID NO: 33214 - protein, 15 aa, synthetic construct
VTDIPQGMVTDQFGM

SEQ ID NO: 33215 - protein, 15 aa, synthetic construct
YFLLATMAYDRYVAI

SEQ ID NO: 33216 - protein, 15 aa, synthetic construct
LIIAEAFDDDTGRYT

SEQ ID NO: 33217 - protein, 15 aa, synthetic construct
IDDLNMEFNPLDHPR

SEQ ID NO: 33218 - protein, 15 aa, synthetic construct
LAPEKHYEISRDGRL

SEQ ID NO: 33219 - protein, 15 aa, synthetic construct
DEDLDYTPTSASFVS

SEQ ID NO: 33220 - protein, 15 aa, synthetic construct
RAWSPAEDSRIRLTA

SEQ ID NO: 33221 - protein, 15 aa, synthetic construct
SCSSNSSGDALVTRI

SEQ ID NO: 33222 - protein, 15 aa, synthetic construct
APEKHYEISRDGRLR

SEQ ID NO: 33223 - protein, 15 aa, synthetic construct
DKSRLMFAMYDLDEN

SEQ ID NO: 33224 - protein, 15 aa, synthetic construct
SMGGEQVYLFDLTYK

SEQ ID NO: 33225 - protein, 15 aa, synthetic construct
QALLSAIQEIEMHAD

SEQ ID NO: 33226 - protein, 15 aa, synthetic construct
AVLSLSSADARQKAF

SEQ ID NO: 33227 - protein, 15 aa, synthetic construct
AGYARAWSPAEDSRI

SEQ ID NO: 33228 - protein, 15 aa, synthetic construct
TDIPQGMVTDQFGMI

SEQ ID NO: 33229 - protein, 15 aa, synthetic construct
EDLDYTPTSASFVSK

SEQ ID NO: 33230 - protein, 15 aa, synthetic construct
SGLSSERSDSDQVMP

SEQ ID NO: 33231 - protein, 15 aa, synthetic construct
ETCLLDILDTAGREE

SEQ ID NO: 33232 - protein, 15 aa, synthetic construct
DLHTLIIAEAFDDDT

SEQ ID NO: 33233 - protein, 15 aa, synthetic construct
SRLMFAMYDLDENGF

SEQ ID NO: 33234 - protein, 15 aa, synthetic construct
MVAPQNGDPDPGASV

SEQ ID NO: 33235 - protein, 15 aa, synthetic construct
HAGYARAWSPAEDSR

SEQ ID NO: 33236 - protein, 15 aa, synthetic construct
GLSSERSDSDQVMPN

SEQ ID NO: 33237 - protein, 15 aa, synthetic construct
TVVSITDVDLIYQNE

SEQ ID NO: 33238 - protein, 15 aa, synthetic construct
AVEFTTLADYLHLLH

SEQ ID NO: 33239 - protein, 15 aa, synthetic construct
TCTTGITDTPPPDGS

SEQ ID NO: 33240 - protein, 15 aa, synthetic construct
TLIIAEAFDDDTGRY

SEQ ID NO: 33241 - protein, 15 aa, synthetic construct
DLDYTPTSASFVSKQ

SEQ ID NO: 33242 - protein, 15 aa, synthetic construct
SSERSDSDQVMPNEN

SEQ ID NO: 33243 - protein, 15 aa, synthetic construct
RNTCTTGITDTPPPD

SEQ ID NO: 33244 - protein, 15 aa, synthetic construct
IQVLPDGRVTDIPQG

SEQ ID NO: 33245 - protein, 15 aa, synthetic construct
LHTLIIAEAFDDDTG

SEQ ID NO: 33246 - protein, 15 aa, synthetic construct
HTLIIAEAFDDDTGR

SEQ ID NO: 33247 - protein, 15 aa, synthetic construct
ELNKQVVSSSEQPQS

SEQ ID NO: 33248 - protein, 15 aa, synthetic construct
TRLHQYIFSHILRPE

SEQ ID NO: 33249 - protein, 15 aa, synthetic construct
EQALLSAIQEIEMHA

SEQ ID NO: 33250 - protein, 15 aa, synthetic construct
KSRLMFAMYDLDENG

SEQ ID NO: 33251 - protein, 15 aa, synthetic construct
NTCTTGITDTPPPDG

SEQ ID NO: 33252 - protein, 15 aa, synthetic construct
GYARAWSPAEDSRIR

SEQ ID NO: 33253 - protein, 15 aa, synthetic construct
EELNKQVVSSSEQPQ

SEQ ID NO: 33254 - protein, 15 aa, synthetic construct
EDVASSSSESEMEEK

SEQ ID NO: 33255 - protein, 15 aa, synthetic construct
PHAGYARAWSPAEDS

SEQ ID NO: 33256 - protein, 9 aa, synthetic construct
LSDFTGPLS

SEQ ID NO: 33257 - protein, 9 aa, synthetic construct
STSAPPTSM

SEQ ID NO: 33258 - protein, 10 aa, synthetic construct
NIQGITKSGY

SEQ ID NO: 33259 - protein, 11 aa, synthetic construct
STGRRGLRSQY

SEQ ID NO: 33260 - protein, 10 aa, synthetic construct
TSLWPMPTCA

SEQ ID NO: 33261 - protein, 10 aa, synthetic construct
SLWTSSSTSA

SEQ ID NO: 33262 - protein, 10 aa, synthetic construct
RLLPSVATPA

SEQ ID NO: 33263 - protein, 10 aa, synthetic construct
SLWPMPTCAA

SEQ ID NO: 33264 - protein, 11 aa, synthetic construct
SLWPMPTCAAA

SEQ ID NO: 33265 - protein, 11 aa, synthetic construct
FLLKARLLPSV

SEQ ID NO: 33266 - protein, 9 aa, synthetic construct
SLWPMPTCA

SEQ ID NO: 33267 - protein, 10 aa, synthetic construct
LLKARLLPSV

SEQ ID NO: 33268 - protein, 9 aa, synthetic construct
RLLPSVATP

SEQ ID NO: 33269 - protein, 9 aa, synthetic construct
YLALWLCHA

SEQ ID NO: 33270 - protein, 9 aa, synthetic construct
LLPSVATPA

SEQ ID NO: 33271 - protein, 9 aa, synthetic construct
ALWLCHAEA

SEQ ID NO: 33272 - protein, 9 aa, synthetic construct
GLRSQYLAL

SEQ ID NO: 33273 - protein, 9 aa, synthetic construct
SLSDFTGPL

SEQ ID NO: 33274 - protein, 8 aa, synthetic construct
SPTSLWPM

SEQ ID NO: 33275 - protein, 9 aa, synthetic construct
WPPPGSRAA

SEQ ID NO: 33276 - protein, 10 aa, synthetic construct
ATPAASPSTT

SEQ ID NO: 33277 - protein, 9 aa, synthetic construct
MPTCAAASW

SEQ ID NO: 33278 - protein, 10 aa, synthetic construct
RLKGSLTSFL

SEQ ID NO: 33279 - protein, 8 aa, synthetic construct
PFQSPTSL

SEQ ID NO: 33280 - protein, 11 aa, synthetic construct
RPFQSPTSLWP

SEQ ID NO: 33281 - protein, 8 aa, synthetic construct
MPTRRWSA

SEQ ID NO: 33282 - protein, 9 aa, synthetic construct
RPFQSPTSL

SEQ ID NO: 33283 - protein, 8 aa, synthetic construct
RPFQSPTS

SEQ ID NO: 33284 - protein, 9 aa, synthetic construct
TPAASPSTT

SEQ ID NO: 33285 - protein, 9 aa, synthetic construct
RLKGSLTSF

SEQ ID NO: 33286 - protein, 10 aa, synthetic construct
RPFQSPTSLW

SEQ ID NO: 33287 - protein, 9 aa, synthetic construct
WPMPTCAAA

SEQ ID NO: 33288 - protein, 11 aa, synthetic construct
LRRPFQSPTSL

SEQ ID NO: 33289 - protein, 11 aa, synthetic construct
RRPFQSPTSLW

SEQ ID NO: 33290 - protein, 9 aa, synthetic construct
APSPCCVPF

SEQ ID NO: 33291 - protein, 8 aa, synthetic construct
VPLGNVPV

SEQ ID NO: 33292 - protein, 11 aa, synthetic construct
SATPAASPSTT

SEQ ID NO: 33293 - protein, 11 aa, synthetic construct
SPSTCSSSALA

SEQ ID NO: 33294 - protein, 10 aa, synthetic construct
SPSTCSSSAL

SEQ ID NO: 33295 - protein, 9 aa, synthetic construct
MPTRRWSAT

SEQ ID NO: 33296 - protein, 10 aa, synthetic construct
RRPFQSPTSL

SEQ ID NO: 33297 - protein, 10 aa, synthetic construct
WPPPGSRAAL

SEQ ID NO: 33298 - protein, 9 aa, synthetic construct
SPSTCSSSA

SEQ ID NO: 33299 - protein, 11 aa, synthetic construct
CWPPPGSRAAL

SEQ ID NO: 33300 - protein, 11 aa, synthetic construct
PSPSTCSSSAL

SEQ ID NO: 33301 - protein, 8 aa, synthetic construct
GPKQQVPL

SEQ ID NO: 33302 - protein, 8 aa, synthetic construct
PPGSRAAL

SEQ ID NO: 33303 - protein, 11 aa, synthetic construct
MPTRRWSATPA

SEQ ID NO: 33304 - protein, 11 aa, synthetic construct
GPKQQVPLGNV

SEQ ID NO: 33305 - protein, 9 aa, synthetic construct
PPPGSRAAL

SEQ ID NO: 33306 - protein, 9 aa, synthetic construct
KARLLPSVA

SEQ ID NO: 33307 - protein, 9 aa, synthetic construct
SPSTTSRAG

SEQ ID NO: 33308 - protein, 9 aa, synthetic construct
TPASRWLWW

SEQ ID NO: 33309 - protein, 10 aa, synthetic construct
VPVSGQPGRL

SEQ ID NO: 33310 - protein, 9 aa, synthetic construct
SARWRQAHF

SEQ ID NO: 33311 - protein, 11 aa, synthetic construct
SPFGSARWRQA

SEQ ID NO: 33312 - protein, 11 aa, synthetic construct
CPGGLCLHHAL

SEQ ID NO: 33313 - protein, 8 aa, synthetic construct
FLLKARLL

SEQ ID NO: 33314 - protein, 9 aa, synthetic construct
FLRRPFQSP

SEQ ID NO: 33315 - protein, 8 aa, synthetic construct
TSFLRRPF

SEQ ID NO: 33316 - protein, 8 aa, synthetic construct
AFLLKARL

SEQ ID NO: 33317 - protein, 8 aa, synthetic construct
ESRRMPNL

SEQ ID NO: 33318 - protein, 8 aa, synthetic construct
EERLKGSL

SEQ ID NO: 33319 - protein, 9 aa, synthetic construct
AFLLKARLL

SEQ ID NO: 33320 - protein, 8 aa, synthetic construct
DNMLRGTV

SEQ ID NO: 33321 - protein, 9 aa, synthetic construct
LGLHRHPLL

SEQ ID NO: 33322 - protein, 8 aa, synthetic construct
LGLHRHPL

SEQ ID NO: 33323 - protein, 9 aa, synthetic construct
RRGLRSQYL

SEQ ID NO: 33324 - protein, 9 aa, synthetic construct
SMPTRRWSA

SEQ ID NO: 33325 - protein, 9 aa, synthetic construct
GLGLHRHPL

SEQ ID NO: 33326 - protein, 8 aa, synthetic construct
GLHRHPLL

SEQ ID NO: 33327 - protein, 9 aa, synthetic construct
SFKFKWPNV

SEQ ID NO: 33328 - protein, 10 aa, synthetic construct
ERLKGSLTSF

SEQ ID NO: 33329 - protein, 9 aa, synthetic construct
YTKETPGGL

SEQ ID NO: 33330 - protein, 8 aa, synthetic construct
ARWRQAHF

SEQ ID NO: 33331 - protein, 9 aa, synthetic construct
RRWSATPAA

SEQ ID NO: 33332 - protein, 9 aa, synthetic construct
LRSTGRRGL

SEQ ID NO: 33333 - protein, 9 aa, synthetic construct
AASPSTTSR

SEQ ID NO: 33334 - protein, 9 aa, synthetic construct
SRAGSSSTW

SEQ ID NO: 33335 - protein, 10 aa, synthetic construct
HKYFEESFKF

SEQ ID NO: 33336 - protein, 9 aa, synthetic construct
LRSQYLALW

SEQ ID NO: 33337 - protein, 8 aa, synthetic construct
LRSQYLAL

SEQ ID NO: 33338 - protein, 8 aa, synthetic construct
RRGLRSQY

SEQ ID NO: 33339 - protein, 9 aa, synthetic construct
WRQAHFRSY

SEQ ID NO: 33340 - protein, 10 aa, synthetic construct
GRRGLRSQYL

SEQ ID NO: 33341 - protein, 10 aa, synthetic construct
WRQAHFRSYL

SEQ ID NO: 33342 - protein, 9 aa, synthetic construct
GRRGLRSQY

SEQ ID NO: 33343 - protein, 10 aa, synthetic construct
RWRQAHFRSY

SEQ ID NO: 33344 - protein, 11 aa, synthetic construct
ARWRQAHFRSY

SEQ ID NO: 33345 - protein, 10 aa, synthetic construct
SRAGSSSTWW

SEQ ID NO: 33346 - protein, 9 aa, synthetic construct
VATPASRWL

SEQ ID NO: 33347 - protein, 10 aa, synthetic construct
TGRRGLRSQY

SEQ ID NO: 33348 - protein, 9 aa, synthetic construct
KYFEESFKF

SEQ ID NO: 33349 - protein, 9 aa, synthetic construct
RQAHFRSYL

SEQ ID NO: 33350 - protein, 9 aa, synthetic construct
HRHPLLRHC

SEQ ID NO: 33351 - protein, 9 aa, synthetic construct
LHHALGLCL

SEQ ID NO: 33352 - protein, 8 aa, synthetic construct
YFEESFKF

SEQ ID NO: 33353 - protein, 15 aa, synthetic construct
RLKGSLTSFLRRPFQ

SEQ ID NO: 33354 - protein, 15 aa, synthetic construct
LKGSLTSFLRRPFQS

SEQ ID NO: 33355 - protein, 15 aa, synthetic construct
QLAIDTEERLKGSLT

SEQ ID NO: 33356 - protein, 15 aa, synthetic construct
KARLLPSVATPASRW

SEQ ID NO: 33357 - protein, 15 aa, synthetic construct
KGSLTSFLRRPFQSP

SEQ ID NO: 33358 - protein, 15 aa, synthetic construct
LRDNIQGITKSGYSP

SEQ ID NO: 33359 - protein, 15 aa, synthetic construct
LLKARLLPSVATPAS

SEQ ID NO: 33360 - protein, 15 aa, synthetic construct
TQLAIDTEERLKGSL

SEQ ID NO: 33361 - protein, 15 aa, synthetic construct
VTQLAIDTEERLKGS

SEQ ID NO: 33362 - protein, 15 aa, synthetic construct
LKARLLPSVATPASR

SEQ ID NO: 33363 - protein, 15 aa, synthetic construct
TPGGLGLHRHPLLRH

SEQ ID NO: 33364 - protein, 15 aa, synthetic construct
HRKVLRDNIQGITKS

SEQ ID NO: 33365 - protein, 15 aa, synthetic construct
PGRLRSTGRRGLRSQ

SEQ ID NO: 33366 - protein, 15 aa, synthetic construct
GQPGRLRSTGRRGLR

SEQ ID NO: 33367 - protein, 15 aa, synthetic construct
RDNIQGITKSGYSPF

SEQ ID NO: 33368 - protein, 15 aa, synthetic construct
VLRDNIQGITKSGYS

SEQ ID NO: 33369 - protein, 15 aa, synthetic construct
GRLRSTGRRGLRSQY

SEQ ID NO: 33370 - protein, 15 aa, synthetic construct
RKVLRDNIQGITKSG

SEQ ID NO: 33371 - protein, 15 aa, synthetic construct
QPGRLRSTGRRGLRS

SEQ ID NO: 33372 - protein, 15 aa, synthetic construct
DNIQGITKSGYSPFG

SEQ ID NO: 33373 - protein, 15 aa, synthetic construct
AVFTPYSAAFLLKAR

SEQ ID NO: 33374 - protein, 15 aa, synthetic construct
TAVFTPYSAAFLLKA

SEQ ID NO: 33375 - protein, 15 aa, synthetic construct
VRTRSLSDFTGPLSS

SEQ ID NO: 33376 - protein, 15 aa, synthetic construct
PNKVQEHYNYTKETP

SEQ ID NO: 33377 - protein, 15 aa, synthetic construct
PKQQVPLGNVPVSGQ

SEQ ID NO: 33378 - protein, 15 aa, synthetic construct
TKSGYSPFGSARWRQ

SEQ ID NO: 33379 - protein, 15 aa, synthetic construct
RTRSLSDFTGPLSSR

SEQ ID NO: 33380 - protein, 15 aa, synthetic construct
TRSLSDFTGPLSSRP

SEQ ID NO: 33381 - protein, 15 aa, synthetic construct
KSGYSPFGSARWRQA

SEQ ID NO: 33382 - protein, 15 aa, synthetic construct
ATPAASPSTTSRAGS

SEQ ID NO: 33383 - protein, 15 aa, synthetic construct
PLGNVPVSGQPGRLR

SEQ ID NO: 33384 - protein, 15 aa, synthetic construct
EERLKGSLTSFLRRP

SEQ ID NO: 33385 - protein, 15 aa, synthetic construct
PAASPSTTSRAGSSS

SEQ ID NO: 33386 - protein, 15 aa, synthetic construct
TPAASPSTTSRAGSS

SEQ ID NO: 33387 - protein, 15 aa, synthetic construct
VFTPYSAAFLLKARL

SEQ ID NO: 33388 - protein, 15 aa, synthetic construct
VPLGNVPVSGQPGRL

SEQ ID NO: 33389 - protein, 15 aa, synthetic construct
QVPLGNVPVSGQPGR

SEQ ID NO: 33390 - protein, 15 aa, synthetic construct
RKVRTRSLSDFTGPL

SEQ ID NO: 33391 - protein, 15 aa, synthetic construct
KVRTRSLSDFTGPLS

SEQ ID NO: 33392 - protein, 15 aa, synthetic construct
EYITVGDKYVSQFNL

SEQ ID NO: 33393 - protein, 9 aa, synthetic construct
ALLQSDRVL

SEQ ID NO: 33394 - protein, 8 aa, synthetic construct
LLSPPVEV

SEQ ID NO: 33395 - protein, 11 aa, synthetic construct
ETLLLSPPVEV

SEQ ID NO: 33396 - protein, 10 aa, synthetic construct
LLLSPPVEVK

SEQ ID NO: 33397 - protein, 10 aa, synthetic construct
SLLGWTLWYT

SEQ ID NO: 33398 - protein, 9 aa, synthetic construct
RLQNSRYKV

SEQ ID NO: 33399 - protein, 9 aa, synthetic construct
LLLSPPVEV

SEQ ID NO: 33400 - protein, 10 aa, synthetic construct
TLLLSPPVEV

SEQ ID NO: 33401 - protein, 11 aa, synthetic construct
TLLLSPPVEVK

SEQ ID NO: 33402 - protein, 11 aa, synthetic construct
ALLQSDRVLYL

SEQ ID NO: 33403 - protein, 9 aa, synthetic construct
FLSLLGWTL

SEQ ID NO: 33404 - protein, 10 aa, synthetic construct
TLWYTGNIEI

SEQ ID NO: 33405 - protein, 10 aa, synthetic construct
RLFRVASKGH

SEQ ID NO: 33406 - protein, 9 aa, synthetic construct
LLSPPVEVK

SEQ ID NO: 33407 - protein, 9 aa, synthetic construct
MALTSNLGK

SEQ ID NO: 33408 - protein, 10 aa, synthetic construct
SNLGKQIKLK

SEQ ID NO: 33409 - protein, 9 aa, synthetic construct
ATLGNLQGY

SEQ ID NO: 33410 - protein, 9 aa, synthetic construct
NLGKQIKLK

SEQ ID NO: 33411 - protein, 9 aa, synthetic construct
SLLGWTLWY

SEQ ID NO: 33412 - protein, 10 aa, synthetic construct
ISRLQNSRYK

SEQ ID NO: 33413 - protein, 11 aa, synthetic construct
ALTSNLGKQIK

SEQ ID NO: 33414 - protein, 9 aa, synthetic construct
LLENYGKFK

SEQ ID NO: 33415 - protein, 11 aa, synthetic construct
SISRLQNSRYK

SEQ ID NO: 33416 - protein, 9 aa, synthetic construct
QVHRILRER

SEQ ID NO: 33417 - protein, 10 aa, synthetic construct
ALLQSDRVLY

SEQ ID NO: 33418 - protein, 9 aa, synthetic construct
SISRLQNSR

SEQ ID NO: 33419 - protein, 11 aa, synthetic construct
VLLENYGKFKK

SEQ ID NO: 33420 - protein, 10 aa, synthetic construct
VLLENYGKFK

SEQ ID NO: 33421 - protein, 10 aa, synthetic construct
LLENYGKFKK

SEQ ID NO: 33422 - protein, 8 aa, synthetic construct
RLQNSRYK

SEQ ID NO: 33423 - protein, 11 aa, synthetic construct
RLFRVASKGRR

SEQ ID NO: 33424 - protein, 10 aa, synthetic construct
RLFRVASKSR

SEQ ID NO: 33425 - protein, 9 aa, synthetic construct
SPSTSSSST

SEQ ID NO: 33426 - protein, 9 aa, synthetic construct
VASKGRRGL

SEQ ID NO: 33427 - protein, 9 aa, synthetic construct
RPSSSSPSS

SEQ ID NO: 33428 - protein, 8 aa, synthetic construct
RPSSSSPS

SEQ ID NO: 33429 - protein, 10 aa, synthetic construct
SPRSSSSSSS

SEQ ID NO: 33430 - protein, 10 aa, synthetic construct
SSPSTSSSST

SEQ ID NO: 33431 - protein, 10 aa, synthetic construct
SPRSSSPSTS

SEQ ID NO: 33432 - protein, 11 aa, synthetic construct
SPRSSSPSTSS

SEQ ID NO: 33433 - protein, 10 aa, synthetic construct
RVASKGHGGL

SEQ ID NO: 33434 - protein, 10 aa, synthetic construct
SSPSPRSSSS

SEQ ID NO: 33435 - protein, 9 aa, synthetic construct
ASKSRGGLL

SEQ ID NO: 33436 - protein, 9 aa, synthetic construct
VASKSRGGL

SEQ ID NO: 33437 - protein, 10 aa, synthetic construct
SPSPRSSSSS

SEQ ID NO: 33438 - protein, 11 aa, synthetic construct
SPSPRSSSSSS

SEQ ID NO: 33439 - protein, 8 aa, synthetic construct
SPRSSSSS

SEQ ID NO: 33440 - protein, 9 aa, synthetic construct
SPRSSSSSS

SEQ ID NO: 33441 - protein, 10 aa, synthetic construct
SASTRHTTPL

SEQ ID NO: 33442 - protein, 11 aa, synthetic construct
RPSSSSPSSSG

SEQ ID NO: 33443 - protein, 11 aa, synthetic construct
SPRSSSSSSSS

SEQ ID NO: 33444 - protein, 9 aa, synthetic construct
SPSPRSSSS

SEQ ID NO: 33445 - protein, 9 aa, synthetic construct
SPRSSSPST

SEQ ID NO: 33446 - protein, 10 aa, synthetic construct
RVASKSRGGL

SEQ ID NO: 33447 - protein, 9 aa, synthetic construct
ASKGHGGLL

SEQ ID NO: 33448 - protein, 10 aa, synthetic construct
RPSSSSPSSS

SEQ ID NO: 33449 - protein, 9 aa, synthetic construct
VASKGHGGL

SEQ ID NO: 33450 - protein, 8 aa, synthetic construct
STRHTTPL

SEQ ID NO: 33451 - protein, 10 aa, synthetic construct
RVASKGRRGL

SEQ ID NO: 33452 - protein, 9 aa, synthetic construct
ASKGRRGLL

SEQ ID NO: 33453 - protein, 9 aa, synthetic construct
ASTRHTTPL

SEQ ID NO: 33454 - protein, 11 aa, synthetic construct
SSSPSPRSSSS

SEQ ID NO: 33455 - protein, 11 aa, synthetic construct
SPSPRSSSPST

SEQ ID NO: 33456 - protein, 9 aa, synthetic construct
SPASAPNSP

SEQ ID NO: 33457 - protein, 10 aa, synthetic construct
PSPRSSSPST

SEQ ID NO: 33458 - protein, 11 aa, synthetic construct
SPASAPNSPRT

SEQ ID NO: 33459 - protein, 9 aa, synthetic construct
SSRPSSSSP

SEQ ID NO: 33460 - protein, 10 aa, synthetic construct
IPESETESPA

SEQ ID NO: 33461 - protein, 10 aa, synthetic construct
SRPSSSSPSS

SEQ ID NO: 33462 - protein, 9 aa, synthetic construct
SSVKTPETL

SEQ ID NO: 33463 - protein, 8 aa, synthetic construct
SVKTPETL

SEQ ID NO: 33464 - protein, 9 aa, synthetic construct
GAADWGNYF

SEQ ID NO: 33465 - protein, 8 aa, synthetic construct
LSQVHRIL

SEQ ID NO: 33466 - protein, 9 aa, synthetic construct
NYFQHYPEL

SEQ ID NO: 33467 - protein, 11 aa, synthetic construct
MAALLQSDRVL

SEQ ID NO: 33468 - protein, 9 aa, synthetic construct
LQNSRYKVL

SEQ ID NO: 33469 - protein, 8 aa, synthetic construct
AADWGNYF

SEQ ID NO: 33470 - protein, 9 aa, synthetic construct
VHRILRERF

SEQ ID NO: 33471 - protein, 8 aa, synthetic construct
YFQHYPEL

SEQ ID NO: 33472 - protein, 9 aa, synthetic construct
FEIVGRSQL

SEQ ID NO: 33473 - protein, 9 aa, synthetic construct
FKKGYLIFV

SEQ ID NO: 33474 - protein, 9 aa, synthetic construct
NYGKFKKGY

SEQ ID NO: 33475 - protein, 8 aa, synthetic construct
HRILRERF

SEQ ID NO: 33476 - protein, 9 aa, synthetic construct
RRGLLEVNL

SEQ ID NO: 33477 - protein, 9 aa, synthetic construct
KFKKGYLIF

SEQ ID NO: 33478 - protein, 8 aa, synthetic construct
SRLQNSRY

SEQ ID NO: 33479 - protein, 9 aa, synthetic construct
TRHTTPLPV

SEQ ID NO: 33480 - protein, 15 aa, synthetic construct
PRLFRVASKGHGGLL

SEQ ID NO: 33481 - protein, 15 aa, synthetic construct
LVPRLFRVASKSRGG

SEQ ID NO: 33482 - protein, 15 aa, synthetic construct
ELVPRLFRVASKSRG

SEQ ID NO: 33483 - protein, 15 aa, synthetic construct
SQVHRILRERFCRQS

SEQ ID NO: 33484 - protein, 15 aa, synthetic construct
EFEIVGRSQLPGPGD

SEQ ID NO: 33485 - protein, 15 aa, synthetic construct
CLSQVHRILRERFCR

SEQ ID NO: 33486 - protein, 15 aa, synthetic construct
PRLFRVASKSRGGLL

SEQ ID NO: 33487 - protein, 15 aa, synthetic construct
LVPRLFRVASKGRRG

SEQ ID NO: 33488 - protein, 15 aa, synthetic construct
VPRLFRVASKSRGGL

SEQ ID NO: 33489 - protein, 15 aa, synthetic construct
MAALLQSDRVLYLVQ

SEQ ID NO: 33490 - protein, 15 aa, synthetic construct
GEEFEIVGRSQLPGP

SEQ ID NO: 33491 - protein, 15 aa, synthetic construct
EEFEIVGRSQLPGPG

SEQ ID NO: 33492 - protein, 15 aa, synthetic construct
LSQVHRILRERFCRQ

SEQ ID NO: 33493 - protein, 15 aa, synthetic construct
SRYKVLASGGLRIQK

SEQ ID NO: 33494 - protein, 15 aa, synthetic construct
GWTLWYTGNIEISRQ

SEQ ID NO: 33495 - protein, 15 aa, synthetic construct
PAETLLLSPPVEVKG

SEQ ID NO: 33496 - protein, 15 aa, synthetic construct
PRLFRVASKGRRGLL

SEQ ID NO: 33497 - protein, 15 aa, synthetic construct
LEPGEEFEIVGRSQL

SEQ ID NO: 33498 - protein, 15 aa, synthetic construct
LGWTLWYTGNIEISR

SEQ ID NO: 33499 - protein, 15 aa, synthetic construct
VPRLFRVASKGHGGL

SEQ ID NO: 33500 - protein, 15 aa, synthetic construct
VPRLFRVASKGRRGL

SEQ ID NO: 33501 - protein, 15 aa, synthetic construct
EPGEEFEIVGRSQLP

SEQ ID NO: 33502 - protein, 15 aa, synthetic construct
LVPRLFRVASKGHGG

SEQ ID NO: 33503 - protein, 15 aa, synthetic construct
AALLQSDRVLYLVQG

SEQ ID NO: 33504 - protein, 15 aa, synthetic construct
KDAISISRLQNSRYK

SEQ ID NO: 33505 - protein, 15 aa, synthetic construct
PGEEFEIVGRSQLPG

SEQ ID NO: 33506 - protein, 15 aa, synthetic construct
AETLLLSPPVEVKGE

SEQ ID NO: 33507 - protein, 15 aa, synthetic construct
LPAETLLLSPPVEVK

SEQ ID NO: 33508 - protein, 15 aa, synthetic construct
NSRYKVLASGGLRIQ

SEQ ID NO: 33509 - protein, 15 aa, synthetic construct
DAISISRLQNSRYKV

SEQ ID NO: 33510 - protein, 15 aa, synthetic construct
AISISRLQNSRYKVL

SEQ ID NO: 33511 - protein, 15 aa, synthetic construct
LQNSRYKVLASGGLR

SEQ ID NO: 33512 - protein, 15 aa, synthetic construct
TATLGNLQGYGMASP

SEQ ID NO: 33513 - protein, 15 aa, synthetic construct
QNSRYKVLASGGLRI

SEQ ID NO: 33514 - protein, 15 aa, synthetic construct
ESDGSRGSEVHTTSA

SEQ ID NO: 33515 - protein, 15 aa, synthetic construct
QSFHYGQTDRQGQSS

SEQ ID NO: 33516 - protein, 15 aa, synthetic construct
SRLQNSRYKVLASGG

SEQ ID NO: 33517 - protein, 15 aa, synthetic construct
QGQSFHYGQTDRQGQ

SEQ ID NO: 33518 - protein, 15 aa, synthetic construct
RLQNSRYKVLASGGL

SEQ ID NO: 33519 - protein, 15 aa, synthetic construct
DGSRGSEVHTTSADA

SEQ ID NO: 33520 - protein, 15 aa, synthetic construct
FESDGSRGSEVHTTS

SEQ ID NO: 33521 - protein, 15 aa, synthetic construct
SDGSRGSEVHTTSAD

SEQ ID NO: 33522 - protein, 15 aa, synthetic construct
GQSFHYGQTDRQGQS

SEQ ID NO: 33523 - protein, 15 aa, synthetic construct
RQGQSFHYGQTDRQG

SEQ ID NO: 33524 - protein, 15 aa, synthetic construct
CGLVNGAADWGNYFQ

SEQ ID NO: 33525 - protein, 15 aa, synthetic construct
GLVNGAADWGNYFQH

SEQ ID NO: 33526 - protein, 15 aa, synthetic construct
STSSSSTSSPSSSSP

SEQ ID NO: 33527 - protein, 15 aa, synthetic construct
SFHYGQTDRQGQSSH

SEQ ID NO: 33528 - protein, 15 aa, synthetic construct
GSRGSEVHTTSADAP

SEQ ID NO: 33529 - protein, 15 aa, synthetic construct
SRGSEVHTTSADAPK

SEQ ID NO: 33530 - protein, 15 aa, synthetic construct
YKDAISISRLQNSRY

SEQ ID NO: 33531 - protein, 15 aa, synthetic construct
ISRLQNSRYKVLASG

SEQ ID NO: 33532 - protein, 15 aa, synthetic construct
RAHSVVFESDGSRGS

SEQ ID NO: 33533 - protein, 15 aa, synthetic construct
WYKDAISISRLQNSR

SEQ ID NO: 33534 - protein, 15 aa, synthetic construct
PSTSSSSTSSPSSSS

SEQ ID NO: 33535 - protein, 15 aa, synthetic construct
CCGLVNGAADWGNYF

SEQ ID NO: 33536 - protein, 15 aa, synthetic construct
SSSSSSSSSRPSSSS

SEQ ID NO: 33537 - protein, 15 aa, synthetic construct
GQSFHYGQTDRQGQS

SEQ ID NO: 33538 - protein, 9 aa, synthetic construct
YSYNLILKK

SEQ ID NO: 33539 - protein, 9 aa, synthetic construct
KLYKSKTEK

SEQ ID NO: 33540 - protein, 9 aa, synthetic construct
GVHHFDSSK

SEQ ID NO: 33541 - protein, 9 aa, synthetic construct
KASQAQILK

SEQ ID NO: 33542 - protein, 9 aa, synthetic construct
KNYPPRTTR

SEQ ID NO: 33543 - protein, 9 aa, synthetic construct
KLFSTLTHK

SEQ ID NO: 33544 - protein, 9 aa, synthetic construct
KLFSTLTKR

SEQ ID NO: 33545 - protein, 9 aa, synthetic construct
KTYSFPHTY

SEQ ID NO: 33546 - protein, 9 aa, synthetic construct
RIRDGGVLK

SEQ ID NO: 33547 - protein, 9 aa, synthetic construct
SSFYNLILK

SEQ ID NO: 33548 - protein, 9 aa, synthetic construct
SIYAPAVLR

SEQ ID NO: 33549 - protein, 9 aa, synthetic construct
AASQAQILK

SEQ ID NO: 33550 - protein, 9 aa, synthetic construct
SVSEMASNK

SEQ ID NO: 33551 - protein, 9 aa, synthetic construct
TVMSQGLPK

SEQ ID NO: 33552 - protein, 9 aa, synthetic construct
RLITPPLPK

SEQ ID NO: 33553 - protein, 9 aa, synthetic construct
RLYLAMLER

SEQ ID NO: 33554 - protein, 9 aa, synthetic construct
SIFDFRTTK

SEQ ID NO: 33555 - protein, 9 aa, synthetic construct
KAFKSTLTR

SEQ ID NO: 33556 - protein, 9 aa, synthetic construct
GVLKREVFK

SEQ ID NO: 33557 - protein, 9 aa, synthetic construct
GLADWKGEK

SEQ ID NO: 33558 - protein, 9 aa, synthetic construct
ALFSTLTRH

SEQ ID NO: 33559 - protein, 9 aa, synthetic construct
SVSWGYIKK

SEQ ID NO: 33560 - protein, 9 aa, synthetic construct
SSNYNLILK

SEQ ID NO: 33561 - protein, 9 aa, synthetic construct
VLNSTSFLY

SEQ ID NO: 33562 - protein, 9 aa, synthetic construct
RTKAGVSYR

SEQ ID NO: 33563 - protein, 9 aa, synthetic construct
GSFDFRTTK

SEQ ID NO: 33564 - protein, 8 aa, synthetic construct
RITPPLPK

SEQ ID NO: 33565 - protein, 8 aa, synthetic construct
KLFSTLTR

SEQ ID NO: 33566 - protein, 9 aa, synthetic construct
EVLDGSMQK

SEQ ID NO: 33567 - protein, 9 aa, synthetic construct
IIADILRIR

SEQ ID NO: 33568 - protein, 9 aa, synthetic construct
EFRNSNYLR

SEQ ID NO: 33569 - protein, 9 aa, synthetic construct
RYDIIKTYR

SEQ ID NO: 33570 - protein, 9 aa, synthetic construct
GAFNSNYLR

SEQ ID NO: 33571 - protein, 9 aa, synthetic construct
KLFSTRHKR

SEQ ID NO: 33572 - protein, 9 aa, synthetic construct
EYPTPRTTR

SEQ ID NO: 33573 - protein, 9 aa, synthetic construct
TVCDTIAQR

SEQ ID NO: 33574 - protein, 9 aa, synthetic construct
AFKLFSTLR

SEQ ID NO: 33575 - protein, 8 aa, synthetic construct
QIATVMSR

SEQ ID NO: 33576 - protein, 9 aa, synthetic construct
PLWGVRSSR

SEQ ID NO: 33577 - protein, 9 aa, synthetic construct
LFSTLTHKR

SEQ ID NO: 33578 - protein, 8 aa, synthetic construct
TKAGVSYR

SEQ ID NO: 33579 - protein, 9 aa, synthetic construct
SIYAPLVLR

SEQ ID NO: 33580 - protein, 9 aa, synthetic construct
YIKKRMLNR

SEQ ID NO: 33581 - protein, 8 aa, synthetic construct
MANVSLHR

SEQ ID NO: 33582 - protein, 9 aa, synthetic construct
TPLPKPASR

SEQ ID NO: 33583 - protein, 9 aa, synthetic construct
EYDIIKTYR

SEQ ID NO: 33584 - protein, 9 aa, synthetic construct
DLMAGSCLR

SEQ ID NO: 33585 - protein, 9 aa, synthetic construct
ITLPKPASR

SEQ ID NO: 33586 - protein, 9 aa, synthetic construct
VIADFCILR

SEQ ID NO: 33587 - protein, 9 aa, synthetic construct
EVADFCILR

SEQ ID NO: 33588 - protein, 9 aa, synthetic construct
SVSWGYIKR

SEQ ID NO: 33589 - protein, 9 aa, synthetic construct
ESFPHTYIR

SEQ ID NO: 33590 - protein, 9 aa, synthetic construct
KTADWKEKR

SEQ ID NO: 33591 - protein, 9 aa, synthetic construct
IYAPIAVLR

SEQ ID NO: 33592 - protein, 9 aa, synthetic construct
VSWGIKCKR

SEQ ID NO: 33593 - protein, 9 aa, synthetic construct
EQIATVMSR

SEQ ID NO: 33594 - protein, 9 aa, synthetic construct
APIAVLRGL

SEQ ID NO: 33595 - protein, 8 aa, synthetic construct
APAPLTTP

SEQ ID NO: 33596 - protein, 9 aa, synthetic construct
SPLPGPSAL

SEQ ID NO: 33597 - protein, 8 aa, synthetic construct
APPPVQSH

SEQ ID NO: 33598 - protein, 9 aa, synthetic construct
APPPQTPSA

SEQ ID NO: 33599 - protein, 9 aa, synthetic construct
RIRDGFGVL

SEQ ID NO: 33600 - protein, 9 aa, synthetic construct
APAPTTPPL

SEQ ID NO: 33601 - protein, 8 aa, synthetic construct
LPRITPPL

SEQ ID NO: 33602 - protein, 8 aa, synthetic construct
CPGPKGSI

SEQ ID NO: 33603 - protein, 9 aa, synthetic construct
APPPSHPPI

SEQ ID NO: 33604 - protein, 9 aa, synthetic construct
APIPQGLSL

SEQ ID NO: 33605 - protein, 8 aa, synthetic construct
KPNGLILF

SEQ ID NO: 33606 - protein, 9 aa, synthetic construct
SPLGPGPSA

SEQ ID NO: 33607 - protein, 8 aa, synthetic construct
TPLELQSL

SEQ ID NO: 33608 - protein, 9 aa, synthetic construct
PPLQTPSAL

SEQ ID NO: 33609 - protein, 9 aa, synthetic construct
TPSAPLTTL

SEQ ID NO: 33610 - protein, 9 aa, synthetic construct
APSGHPSAM

SEQ ID NO: 33611 - protein, 9 aa, synthetic construct
APSGPLSAM

SEQ ID NO: 33612 - protein, 9 aa, synthetic construct
APLWVGGSL

SEQ ID NO: 33613 - protein, 8 aa, synthetic construct
PLWVGGSL

SEQ ID NO: 33614 - protein, 9 aa, synthetic construct
ALRLPRITL

SEQ ID NO: 33615 - protein, 9 aa, synthetic construct
RPRITPPLP

SEQ ID NO: 33616 - protein, 8 aa, synthetic construct
IPQGLSCL

SEQ ID NO: 33617 - protein, 9 aa, synthetic construct
LPDPVLEPL

SEQ ID NO: 33618 - protein, 9 aa, synthetic construct
YPRTTRTGH

SEQ ID NO: 33619 - protein, 9 aa, synthetic construct
YPGGPKGSI

SEQ ID NO: 33620 - protein, 9 aa, synthetic construct
APAPPPVSH

SEQ ID NO: 33621 - protein, 9 aa, synthetic construct
APAPPPVQP

SEQ ID NO: 33622 - protein, 8 aa, synthetic construct
APAPPPVQ

SEQ ID NO: 33623 - protein, 9 aa, synthetic construct
QPAPAPPPV

SEQ ID NO: 33624 - protein, 9 aa, synthetic construct
GPLWVGGSV

SEQ ID NO: 33625 - protein, 9 aa, synthetic construct
GPLGGSLVL

SEQ ID NO: 33626 - protein, 9 aa, synthetic construct
HPLWVGGSL

SEQ ID NO: 33627 - protein, 9 aa, synthetic construct
APAPLTTPL

SEQ ID NO: 33628 - protein, 9 aa, synthetic construct
SPHGSSSAS

SEQ ID NO: 33629 - protein, 9 aa, synthetic construct
RTKPNGLIL

SEQ ID NO: 33630 - protein, 9 aa, synthetic construct
CPGPKGSIF

SEQ ID NO: 33631 - protein, 9 aa, synthetic construct
QPRSAASQA

SEQ ID NO: 33632 - protein, 8 aa, synthetic construct
APIPQGLS

SEQ ID NO: 33633 - protein, 9 aa, synthetic construct
IPQGLSSRF

SEQ ID NO: 33634 - protein, 9 aa, synthetic construct
APPPLQTAA

SEQ ID NO: 33635 - protein, 8 aa, synthetic construct
HPLSAMSF

SEQ ID NO: 33636 - protein, 9 aa, synthetic construct
DSMQKVLVW

SEQ ID NO: 33637 - protein, 9 aa, synthetic construct
TTKPGLILF

SEQ ID NO: 33638 - protein, 9 aa, synthetic construct
LGDLIMALW

SEQ ID NO: 33639 - protein, 9 aa, synthetic construct
KGVGDVHHF

SEQ ID NO: 33640 - protein, 9 aa, synthetic construct
YAYGLKTAW

SEQ ID NO: 33641 - protein, 9 aa, synthetic construct
LSCLSRFLW

SEQ ID NO: 33642 - protein, 9 aa, synthetic construct
FSFVGMDSW

SEQ ID NO: 33643 - protein, 9 aa, synthetic construct
LSMQKVLVW

SEQ ID NO: 33644 - protein, 9 aa, synthetic construct
DTVSAELSW

SEQ ID NO: 33645 - protein, 9 aa, synthetic construct
LADEVITSF

SEQ ID NO: 33646 - protein, 9 aa, synthetic construct
RTTKPNILF

SEQ ID NO: 33647 - protein, 9 aa, synthetic construct
RTTPNGLIL

SEQ ID NO: 33648 - protein, 8 aa, synthetic construct
SMQKVLVW

SEQ ID NO: 33649 - protein, 9 aa, synthetic construct
YSKTEKYSF

SEQ ID NO: 33650 - protein, 9 aa, synthetic construct
RSNYLRLLF

SEQ ID NO: 33651 - protein, 9 aa, synthetic construct
TTKPNGLLF

SEQ ID NO: 33652 - protein, 9 aa, synthetic construct
QALDKATEY

SEQ ID NO: 33653 - protein, 9 aa, synthetic construct
HMSEPPHSM

SEQ ID NO: 33654 - protein, 8 aa, synthetic construct
LSAMSFAY

SEQ ID NO: 33655 - protein, 8 aa, synthetic construct
TAFSIHSL

SEQ ID NO: 33656 - protein, 8 aa, synthetic construct
YSNYNLIL

SEQ ID NO: 33657 - protein, 8 aa, synthetic construct
GAFRNSNY

SEQ ID NO: 33658 - protein, 8 aa, synthetic construct
TSLTPLEL

SEQ ID NO: 33659 - protein, 8 aa, synthetic construct
YSFYNLIL

SEQ ID NO: 33660 - protein, 9 aa, synthetic construct
NYDIIKTYY

SEQ ID NO: 33661 - protein, 9 aa, synthetic construct
DYPDPVLEL

SEQ ID NO: 33662 - protein, 9 aa, synthetic construct
FRTPNGLIL

SEQ ID NO: 33663 - protein, 9 aa, synthetic construct
IYKESDYSF

SEQ ID NO: 33664 - protein, 9 aa, synthetic construct
HRTKAGVSY

SEQ ID NO: 33665 - protein, 9 aa, synthetic construct
TKYSFPHTY

SEQ ID NO: 33666 - protein, 9 aa, synthetic construct
KKYSFPHTY

SEQ ID NO: 33667 - protein, 8 aa, synthetic construct
YRYLYLAM

SEQ ID NO: 33668 - protein, 9 aa, synthetic construct
FRNSNYLLL

SEQ ID NO: 33669 - protein, 9 aa, synthetic construct
FRNSNRLLF

SEQ ID NO: 33670 - protein, 8 aa, synthetic construct
RRQIATVM

SEQ ID NO: 33671 - protein, 9 aa, synthetic construct
RRTKAGVSY

SEQ ID NO: 33672 - protein, 9 aa, synthetic construct
SHPLSAMSF

SEQ ID NO: 33673 - protein, 9 aa, synthetic construct
FKLFSTLTR

SEQ ID NO: 33674 - protein, 9 aa, synthetic construct
LQGEKASQA

SEQ ID NO: 33675 - protein, 9 aa, synthetic construct
LRMVQALLS

SEQ ID NO: 33676 - protein, 9 aa, synthetic construct
VQALLSNSS

SEQ ID NO: 33677 - protein, 9 aa, synthetic construct
VSEMASNKC

SEQ ID NO: 33678 - protein, 9 aa, synthetic construct
VLVWQNLDS

SEQ ID NO: 33679 - protein, 9 aa, synthetic construct
YLRTESHQH

SEQ ID NO: 33680 - protein, 9 aa, synthetic construct
IASKDTTPS

SEQ ID NO: 33681 - protein, 9 aa, synthetic construct
IVSLGTLGD

SEQ ID NO: 33682 - protein, 9 aa, synthetic construct
VHHFDSSKI

SEQ ID NO: 33683 - protein, 9 aa, synthetic construct
LELQSLDVG

SEQ ID NO: 33684 - protein, 9 aa, synthetic construct
IVPVFIQDA

SEQ ID NO: 33685 - protein, 9 aa, synthetic construct
ILRIRTKGG

SEQ ID NO: 33686 - protein, 9 aa, synthetic construct
LNLDDDSHE

SEQ ID NO: 33687 - protein, 9 aa, synthetic construct
LQTAPAPLT

SEQ ID NO: 33688 - protein, 9 aa, synthetic construct
MKAIVSLGT

SEQ ID NO: 33689 - protein, 9 aa, synthetic construct
YRGERTQDE

SEQ ID NO: 33690 - protein, 9 aa, synthetic construct
IATVMSRAQ

SEQ ID NO: 33691 - protein, 9 aa, synthetic construct
LQIVPVFIQ

SEQ ID NO: 33692 - protein, 9 aa, synthetic construct
VITVFSFVG

SEQ ID NO: 33693 - protein, 9 aa, synthetic construct
LNRELTHLS

SEQ ID NO: 33694 - protein, 9 aa, synthetic construct
IVASGNIGS

SEQ ID NO: 33695 - protein, 9 aa, synthetic construct
VQSHPPIIA

SEQ ID NO: 33696 - protein, 9 aa, synthetic construct
YKQTESDYS

SEQ ID NO: 33697 - protein, 9 aa, synthetic construct
YDIIKTYRY

SEQ ID NO: 33698 - protein, 9 aa, synthetic construct
LKREDVFKA

SEQ ID NO: 33699 - protein, 9 aa, synthetic construct
IIVASGNIG

SEQ ID NO: 33700 - protein, 9 aa, synthetic construct
LIGSPPQPS

SEQ ID NO: 33701 - protein, 9 aa, synthetic construct
FQSAASQAQ

SEQ ID NO: 33702 - protein, 9 aa, synthetic construct
LLSVAATPA

SEQ ID NO: 33703 - protein, 9 aa, synthetic construct
LRGLIVPEI

SEQ ID NO: 33704 - protein, 9 aa, synthetic construct
IIASKDTTP

SEQ ID NO: 33705 - protein, 9 aa, synthetic construct
LSPAFSEDS

SEQ ID NO: 33706 - protein, 9 aa, synthetic construct
YRPAEVAET

SEQ ID NO: 33707 - protein, 9 aa, synthetic construct
LSVAATPAA

SEQ ID NO: 33708 - protein, 9 aa, synthetic construct
LVLNSTSFL

SEQ ID NO: 33709 - protein, 9 aa, synthetic construct
LILKKAGQF

SEQ ID NO: 33710 - protein, 9 aa, synthetic construct
WKGEKRASE

SEQ ID NO: 33711 - protein, 9 aa, synthetic construct
ILDKATEYI

SEQ ID NO: 33712 - protein, 9 aa, synthetic construct
LHRNPATLK

SEQ ID NO: 33713 - protein, 9 aa, synthetic construct
LRTESHQHQ

SEQ ID NO: 33714 - protein, 9 aa, synthetic construct
FSTLTRHKR

SEQ ID NO: 33715 - protein, 9 aa, synthetic construct
LVRSPKSAG

SEQ ID NO: 33716 - protein, 9 aa, synthetic construct
YNLILKKAG

SEQ ID NO: 33717 - protein, 9 aa, synthetic construct
IIKTYRYLY

SEQ ID NO: 33718 - protein, 9 aa, synthetic construct
ILFSHGKPR

SEQ ID NO: 33719 - protein, 9 aa, synthetic construct
LVVADKMMV

SEQ ID NO: 33720 - protein, 9 aa, synthetic construct
IVPEIRGNE

SEQ ID NO: 33721 - protein, 9 aa, synthetic construct
FGVLKREDV

SEQ ID NO: 33722 - protein, 9 aa, synthetic construct
VVGSGSWQR

SEQ ID NO: 33723 - protein, 9 aa, synthetic construct
WQRANAQTA

SEQ ID NO: 33724 - protein, 9 aa, synthetic construct
TDTVSAELS

SEQ ID NO: 33725 - protein, 9 aa, synthetic construct
TSGIIASKD

SEQ ID NO: 33726 - protein, 9 aa, synthetic construct
LEEIEETEG

SEQ ID NO: 33727 - protein, 9 aa, synthetic construct
MSFAYAAGA

SEQ ID NO: 33728 - protein, 9 aa, synthetic construct
LKGSQDSSE

SEQ ID NO: 33729 - protein, 9 aa, synthetic construct
ERTQDEEEG

SEQ ID NO: 33730 - protein, 9 aa, synthetic construct
RRGTKAGVS

SEQ ID NO: 33731 - protein, 9 aa, synthetic construct
VSAVSIEEG

SEQ ID NO: 33732 - protein, 9 aa, synthetic construct
EKASQAQIL

SEQ ID NO: 33733 - protein, 9 aa, synthetic construct
FDALNLDDD

SEQ ID NO: 33734 - protein, 9 aa, synthetic construct
FDSSKIMEE

SEQ ID NO: 33735 - protein, 9 aa, synthetic construct
SNSSGDALV

SEQ ID NO: 33736 - protein, 9 aa, synthetic construct
STSFLDYPD

SEQ ID NO: 33737 - protein, 9 aa, synthetic construct
GERTQDEEE

SEQ ID NO: 33738 - protein, 9 aa, synthetic construct
DSGGFDALN

SEQ ID NO: 33739 - protein, 9 aa, synthetic construct
SGGFDALNL

SEQ ID NO: 33740 - protein, 9 aa, synthetic construct
VGMDSDWLM

SEQ ID NO: 33741 - protein, 9 aa, synthetic construct
TEGEGLQEE

SEQ ID NO: 33742 - protein, 9 aa, synthetic construct
AVSIEEGAF

SEQ ID NO: 33743 - protein, 9 aa, synthetic construct
AQLEEIEET

SEQ ID NO: 33744 - protein, 9 aa, synthetic construct
PHGSSSASS

SEQ ID NO: 33745 - protein, 9 aa, synthetic construct
LQEEGVQLE

SEQ ID NO: 33746 - protein, 9 aa, synthetic construct
TVFSFVGMD

SEQ ID NO: 33747 - protein, 9 aa, synthetic construct
EEAQLEEIE

SEQ ID NO: 33748 - protein, 9 aa, synthetic construct
ANAQTAVRS

SEQ ID NO: 33749 - protein, 9 aa, synthetic construct
FAYAAGAGQ

SEQ ID NO: 33750 - protein, 9 aa, synthetic construct
LGSSTAFSI

SEQ ID NO: 33751 - protein, 9 aa, synthetic construct
PVQSHPPII

SEQ ID NO: 33752 - protein, 9 aa, synthetic construct
IPREKNNFF

SEQ ID NO: 33753 - protein, 8 aa, synthetic construct
NFFDRHCF

SEQ ID NO: 33754 - protein, 9 aa, synthetic construct
ILNTGKILL

SEQ ID NO: 33755 - protein, 9 aa, synthetic construct
TQLPPSFAV

SEQ ID NO: 33756 - protein, 9 aa, synthetic construct
RIMPGAFRL

SEQ ID NO: 33757 - protein, 9 aa, synthetic construct
GLGDWFQRV

SEQ ID NO: 33758 - protein, 9 aa, synthetic construct
RMLDDYEEI

SEQ ID NO: 33759 - protein, 9 aa, synthetic construct
YMYPSKVHI

SEQ ID NO: 33760 - protein, 9 aa, synthetic construct
YLHDVTDKI

SEQ ID NO: 33761 - protein, 9 aa, synthetic construct
KLLAALQGL

SEQ ID NO: 33762 - protein, 9 aa, synthetic construct
SMFISLPRV

SEQ ID NO: 33763 - protein, 9 aa, synthetic construct
VQLEHLTEL

SEQ ID NO: 33764 - protein, 8 aa, synthetic construct
FLYSKFTV

SEQ ID NO: 33765 - protein, 9 aa, synthetic construct
KLDDDSEKL

SEQ ID NO: 33766 - protein, 9 aa, synthetic construct
FLVKDIYFL

SEQ ID NO: 33767 - protein, 9 aa, synthetic construct
KLAKGTVQV

SEQ ID NO: 33768 - protein, 9 aa, synthetic construct
NLLKDIYFL

SEQ ID NO: 33769 - protein, 9 aa, synthetic construct
FLSDSNISL

SEQ ID NO: 33770 - protein, 9 aa, synthetic construct
KLEDGQIRL

SEQ ID NO: 33771 - protein, 9 aa, synthetic construct
TLQPGVWML

SEQ ID NO: 33772 - protein, 9 aa, synthetic construct
ALHDVTIPM

SEQ ID NO: 33773 - protein, 9 aa, synthetic construct
LLLGGSLVL

SEQ ID NO: 33774 - protein, 9 aa, synthetic construct
ALVGSNITV

SEQ ID NO: 33775 - protein, 9 aa, synthetic construct
ALVGSITFV

SEQ ID NO: 33776 - protein, 9 aa, synthetic construct
GLPPPLSQL

SEQ ID NO: 33777 - protein, 9 aa, synthetic construct
YMSRTPHAL

SEQ ID NO: 33778 - protein, 9 aa, synthetic construct
GVMGIIIEL

SEQ ID NO: 33779 - protein, 9 aa, synthetic construct
KLDDDSELV

SEQ ID NO: 33780 - protein, 9 aa, synthetic construct
MVYEGNARL

SEQ ID NO: 33781 - protein, 9 aa, synthetic construct
KLAKGTVQM

SEQ ID NO: 33782 - protein, 9 aa, synthetic construct
LFSANKWSR

SEQ ID NO: 33783 - protein, 9 aa, synthetic construct
RIKGEAETR

SEQ ID NO: 33784 - protein, 9 aa, synthetic construct
RGKASSSKR

SEQ ID NO: 33785 - protein, 9 aa, synthetic construct
VTPDTKALR

SEQ ID NO: 33786 - protein, 9 aa, synthetic construct
MGLGVTSSR

SEQ ID NO: 33787 - protein, 9 aa, synthetic construct
KSYEEKPYK

SEQ ID NO: 33788 - protein, 9 aa, synthetic construct
KSLTLLHSK

SEQ ID NO: 33789 - protein, 9 aa, synthetic construct
KGKLPGTSR

SEQ ID NO: 33790 - protein, 9 aa, synthetic construct
TFSAKYMSR

SEQ ID NO: 33791 - protein, 8 aa, synthetic construct
SAYNKWSR

SEQ ID NO: 33792 - protein, 9 aa, synthetic construct
KANEHIPIR

SEQ ID NO: 33793 - protein, 9 aa, synthetic construct
ASQKPRLNR

SEQ ID NO: 33794 - protein, 9 aa, synthetic construct
TVVNLIFPR

SEQ ID NO: 33795 - protein, 9 aa, synthetic construct
IMNEHNAYR

SEQ ID NO: 33796 - protein, 9 aa, synthetic construct
YSKFTVKSR

SEQ ID NO: 33797 - protein, 9 aa, synthetic construct
YFKGPPYLK

SEQ ID NO: 33798 - protein, 9 aa, synthetic construct
SVAQVVAER

SEQ ID NO: 33799 - protein, 9 aa, synthetic construct
AAASQLKPR

SEQ ID NO: 33800 - protein, 9 aa, synthetic construct
LLKPDSEQR

SEQ ID NO: 33801 - protein, 9 aa, synthetic construct
AYVPMAVSR

SEQ ID NO: 33802 - protein, 9 aa, synthetic construct
GGKLPGTSR

SEQ ID NO: 33803 - protein, 9 aa, synthetic construct
KTFSAKMSR

SEQ ID NO: 33804 - protein, 9 aa, synthetic construct
ALHSGQIER

SEQ ID NO: 33805 - protein, 9 aa, synthetic construct
LVKDIFLHK

SEQ ID NO: 33806 - protein, 9 aa, synthetic construct
QFHESFLYR

SEQ ID NO: 33807 - protein, 9 aa, synthetic construct
VVHKPSASR

SEQ ID NO: 33808 - protein, 9 aa, synthetic construct
LGFEKVQLR

SEQ ID NO: 33809 - protein, 9 aa, synthetic construct
IQFESFLYR

SEQ ID NO: 33810 - protein, 9 aa, synthetic construct
VSFQPDTNR

SEQ ID NO: 33811 - protein, 8 aa, synthetic construct
RIMPGAFR

SEQ ID NO: 33812 - protein, 9 aa, synthetic construct
TSRDIQTAR

SEQ ID NO: 33813 - protein, 9 aa, synthetic construct
QTGPVPPRR

SEQ ID NO: 33814 - protein, 8 aa, synthetic construct
VVNLIFPR

SEQ ID NO: 33815 - protein, 9 aa, synthetic construct
VHKPSMPSR

SEQ ID NO: 33816 - protein, 9 aa, synthetic construct
YGLDRWFQR

SEQ ID NO: 33817 - protein, 9 aa, synthetic construct
LYSKFTVSR

SEQ ID NO: 33818 - protein, 9 aa, synthetic construct
AVYLIQIAR

SEQ ID NO: 33819 - protein, 9 aa, synthetic construct
KLFSAKWSR

SEQ ID NO: 33820 - protein, 9 aa, synthetic construct
ITFNLIFPR

SEQ ID NO: 33821 - protein, 9 aa, synthetic construct
TMPPPPVSR

SEQ ID NO: 33822 - protein, 9 aa, synthetic construct
ALRSTYQNR

SEQ ID NO: 33823 - protein, 8 aa, synthetic construct
STTPLPRR

SEQ ID NO: 33824 - protein, 9 aa, synthetic construct
LMNEHNAYR

SEQ ID NO: 33825 - protein, 9 aa, synthetic construct
LSRIPGAFR

SEQ ID NO: 33826 - protein, 9 aa, synthetic construct
GRPSTPQRK

SEQ ID NO: 33827 - protein, 9 aa, synthetic construct
SRQTAVRLL

SEQ ID NO: 33828 - protein, 9 aa, synthetic construct
SRIQTAVRL

SEQ ID NO: 33829 - protein, 9 aa, synthetic construct
GRGAFAAGF

SEQ ID NO: 33830 - protein, 9 aa, synthetic construct
HRILNKTGL

SEQ ID NO: 33831 - protein, 9 aa, synthetic construct
QRYGQLSEK

SEQ ID NO: 33832 - protein, 9 aa, synthetic construct
SRFAGIVAV

SEQ ID NO: 33833 - protein, 9 aa, synthetic construct
RRIEDGDSM

SEQ ID NO: 33834 - protein, 9 aa, synthetic construct
QRLTCQVKL

SEQ ID NO: 33835 - protein, 9 aa, synthetic construct
TRLATDLMR

SEQ ID NO: 33836 - protein, 9 aa, synthetic construct
KRSTITSRI

SEQ ID NO: 33837 - protein, 9 aa, synthetic construct
SRLPLAVHC

SEQ ID NO: 33838 - protein, 9 aa, synthetic construct
MRMKTMPFF

SEQ ID NO: 33839 - protein, 9 aa, synthetic construct
SRLTLLHSK

SEQ ID NO: 33840 - protein, 9 aa, synthetic construct
RRILNKTGK

SEQ ID NO: 33841 - protein, 9 aa, synthetic construct
HRYTEEKPY

SEQ ID NO: 33842 - protein, 9 aa, synthetic construct
IRYGQLSEK

SEQ ID NO: 33843 - protein, 9 aa, synthetic construct
KRKKVKMGK

SEQ ID NO: 33844 - protein, 9 aa, synthetic construct
ERLKLFSAY

SEQ ID NO: 33845 - protein, 9 aa, synthetic construct
SRIMPGANL

SEQ ID NO: 33846 - protein, 9 aa, synthetic construct
ERVKMILKL

SEQ ID NO: 33847 - protein, 9 aa, synthetic construct
MRTPHWALF

SEQ ID NO: 33848 - protein, 9 aa, synthetic construct
LRHQPHQQL

SEQ ID NO: 33849 - protein, 8 aa, synthetic construct
SRIMPGAF

SEQ ID NO: 33850 - protein, 9 aa, synthetic construct
ERLVKMILK

SEQ ID NO: 33851 - protein, 9 aa, synthetic construct
GRFAGIVNS

SEQ ID NO: 33852 - protein, 9 aa, synthetic construct
KRASSSGKR

SEQ ID NO: 33853 - protein, 9 aa, synthetic construct
KRKASSSGK

SEQ ID NO: 33854 - protein, 9 aa, synthetic construct
SRFAGIVSA

SEQ ID NO: 33855 - protein, 9 aa, synthetic construct
GRLPLAVHA

SEQ ID NO: 33856 - protein, 9 aa, synthetic construct
GRLPLAVHQ

SEQ ID NO: 33857 - protein, 9 aa, synthetic construct
RRAPPAVAT

SEQ ID NO: 33858 - protein, 9 aa, synthetic construct
GRGGLGNVL

SEQ ID NO: 33859 - protein, 8 aa, synthetic construct
SRTPHWAL

SEQ ID NO: 33860 - protein, 9 aa, synthetic construct
RKFSGTPAR

SEQ ID NO: 33861 - protein, 8 aa, synthetic construct
RRAGPPAV

SEQ ID NO: 33862 - protein, 9 aa, synthetic construct
QRVEDRLNR

SEQ ID NO: 33863 - protein, 9 aa, synthetic construct
IRFSGTPAR

SEQ ID NO: 33864 - protein, 9 aa, synthetic construct
SRKLVKMIL

SEQ ID NO: 33865 - protein, 9 aa, synthetic construct
IRLALRLTY

SEQ ID NO: 33866 - protein, 9 aa, synthetic construct
ERKTPSLQL

SEQ ID NO: 33867 - protein, 9 aa, synthetic construct
LRLESTYQR

SEQ ID NO: 33868 - protein, 9 aa, synthetic construct
GRFEAAGFH

SEQ ID NO: 33869 - protein, 8 aa, synthetic construct
KRPSLQLF

SEQ ID NO: 33870 - protein, 9 aa, synthetic construct
YRTPHWALF

SEQ ID NO: 33871 - protein, 9 aa, synthetic construct
TRLATDLGM

SEQ ID NO: 33872 - protein, 9 aa, synthetic construct
KRSEAVPAL

SEQ ID NO: 33873 - protein, 9 aa, synthetic construct
LRIMPGAFR

SEQ ID NO: 33874 - protein, 9 aa, synthetic construct
MRVTMPFFL

SEQ ID NO: 33875 - protein, 9 aa, synthetic construct
IENELSRIM

SEQ ID NO: 33876 - protein, 8 aa, synthetic construct
YESDVVEW

SEQ ID NO: 33877 - protein, 9 aa, synthetic construct
QELEHLTEL

SEQ ID NO: 33878 - protein, 9 aa, synthetic construct
VEYDLISQY

SEQ ID NO: 33879 - protein, 9 aa, synthetic construct
EDIHSGLAY

SEQ ID NO: 33880 - protein, 9 aa, synthetic construct
QECLFHGNY

SEQ ID NO: 33881 - protein, 9 aa, synthetic construct
FEYDISQYM

SEQ ID NO: 33882 - protein, 9 aa, synthetic construct
LELSQQQQL

SEQ ID NO: 33883 - protein, 9 aa, synthetic construct
KDMSRTPHW

SEQ ID NO: 33884 - protein, 9 aa, synthetic construct
QELPPSFAV

SEQ ID NO: 33885 - protein, 9 aa, synthetic construct
SEILSAPEW

SEQ ID NO: 33886 - protein, 8 aa, synthetic construct
VENYLIQI

SEQ ID NO: 33887 - protein, 8 aa, synthetic construct
HDAIPIRW

SEQ ID NO: 33888 - protein, 9 aa, synthetic construct
TEYEVAQSA

SEQ ID NO: 33889 - protein, 9 aa, synthetic construct
SKFTVDKSW

SEQ ID NO: 33890 - protein, 9 aa, synthetic construct
YEQSPAKAL

SEQ ID NO: 33891 - protein, 9 aa, synthetic construct
IEPNKPPVF

SEQ ID NO: 33892 - protein, 9 aa, synthetic construct
EEVHSGLAY

SEQ ID NO: 33893 - protein, 9 aa, synthetic construct
TESSSGQAV

SEQ ID NO: 33894 - protein, 9 aa, synthetic construct
LEDGQKRLL

SEQ ID NO: 33895 - protein, 9 aa, synthetic construct
LEDGQKIRL

SEQ ID NO: 33896 - protein, 9 aa, synthetic construct
NEHDIPIRW

SEQ ID NO: 33897 - protein, 9 aa, synthetic construct
KENNISVVF

SEQ ID NO: 33898 - protein, 9 aa, synthetic construct
NELSRIMAF

SEQ ID NO: 33899 - protein, 9 aa, synthetic construct
RDQPGMRVW

SEQ ID NO: 33900 - protein, 9 aa, synthetic construct
SEAYGGLAL

SEQ ID NO: 33901 - protein, 9 aa, synthetic construct
VENYLIQRY

SEQ ID NO: 33902 - protein, 9 aa, synthetic construct
MEHNAYRCF

SEQ ID NO: 33903 - protein, 9 aa, synthetic construct
AEDIVHSGL

SEQ ID NO: 33904 - protein, 9 aa, synthetic construct
AEAYGRMGL

SEQ ID NO: 33905 - protein, 9 aa, synthetic construct
GEVPVPVTF

SEQ ID NO: 33906 - protein, 9 aa, synthetic construct
QEYDLISQY

SEQ ID NO: 33907 - protein, 9 aa, synthetic construct
SDYHPTGTF

SEQ ID NO: 33908 - protein, 9 aa, synthetic construct
GDKPESPEY

SEQ ID NO: 33909 - protein, 9 aa, synthetic construct
SELPPSFAI

SEQ ID NO: 33910 - protein, 9 aa, synthetic construct
QESQSVEEL

SEQ ID NO: 33911 - protein, 8 aa, synthetic construct
EYDLISQY

SEQ ID NO: 33912 - protein, 9 aa, synthetic construct
REDNIRLAL

SEQ ID NO: 33913 - protein, 9 aa, synthetic construct
QDVDLHTQF

SEQ ID NO: 33914 - protein, 9 aa, synthetic construct
SEEDIVHSA

SEQ ID NO: 33915 - protein, 9 aa, synthetic construct
SEEDIVHSL

SEQ ID NO: 33916 - protein, 8 aa, synthetic construct
SERKLVKM

SEQ ID NO: 33917 - protein, 9 aa, synthetic construct
QELQLKSAV

SEQ ID NO: 33918 - protein, 8 aa, synthetic construct
LEQPHQQL

SEQ ID NO: 33919 - protein, 9 aa, synthetic construct
GDKEALKEF

SEQ ID NO: 33920 - protein, 9 aa, synthetic construct
GEDGDTKEL

SEQ ID NO: 33921 - protein, 9 aa, synthetic construct
SERKLVKML

SEQ ID NO: 33922 - protein, 9 aa, synthetic construct
AEVEQRQEL

SEQ ID NO: 33923 - protein, 9 aa, synthetic construct
WDYESVVEW

SEQ ID NO: 33924 - protein, 9 aa, synthetic construct
IVPDSRLKI

SEQ ID NO: 33925 - protein, 8 aa, synthetic construct
MPGAFRNL

SEQ ID NO: 33926 - protein, 8 aa, synthetic construct
LPPSFAVI

SEQ ID NO: 33927 - protein, 9 aa, synthetic construct
QSPPSFAVI

SEQ ID NO: 33928 - protein, 9 aa, synthetic construct
TMDTTKTVL

SEQ ID NO: 33929 - protein, 9 aa, synthetic construct
GVPLHSTTL

SEQ ID NO: 33930 - protein, 8 aa, synthetic construct
ELPPSFAV

SEQ ID NO: 33931 - protein, 9 aa, synthetic construct
LVPDSEQRL

SEQ ID NO: 33932 - protein, 8 aa, synthetic construct
VAAVGSHL

SEQ ID NO: 33933 - protein, 8 aa, synthetic construct
GLPPHYPL

SEQ ID NO: 33934 - protein, 8 aa, synthetic construct
VPDSEQRL

SEQ ID NO: 33935 - protein, 9 aa, synthetic construct
KIPTAHSHV

SEQ ID NO: 33936 - protein, 9 aa, synthetic construct
KVPDSEQRL

SEQ ID NO: 33937 - protein, 9 aa, synthetic construct
KTPDTKALL

SEQ ID NO: 33938 - protein, 9 aa, synthetic construct
YVPAVGSRF

SEQ ID NO: 33939 - protein, 8 aa, synthetic construct
VVHKPSAM

SEQ ID NO: 33940 - protein, 8 aa, synthetic construct
FSNSSHLM

SEQ ID NO: 33941 - protein, 8 aa, synthetic construct
SLPRVKEL

SEQ ID NO: 33942 - protein, 9 aa, synthetic construct
SMPGAFRNL

SEQ ID NO: 33943 - protein, 9 aa, synthetic construct
SLPPSFAVI

SEQ ID NO: 33944 - protein, 9 aa, synthetic construct
TSPPPCNSV

SEQ ID NO: 33945 - protein, 9 aa, synthetic construct
LQPGMRVML

SEQ ID NO: 33946 - protein, 9 aa, synthetic construct
VIPNKPPVF

SEQ ID NO: 33947 - protein, 9 aa, synthetic construct
FLSDSNMSL

SEQ ID NO: 33948 - protein, 9 aa, synthetic construct
WLPTTPAAL

SEQ ID NO: 33949 - protein, 8 aa, synthetic construct
TMPPPPVS

SEQ ID NO: 33950 - protein, 9 aa, synthetic construct
FISPRVKEL

SEQ ID NO: 33951 - protein, 8 aa, synthetic construct
AASEPEVL

SEQ ID NO: 33952 - protein, 9 aa, synthetic construct
TVPDTKALL

SEQ ID NO: 33953 - protein, 9 aa, synthetic construct
RIPGAFRNL

SEQ ID NO: 33954 - protein, 9 aa, synthetic construct
FQPDNRANF

SEQ ID NO: 33955 - protein, 9 aa, synthetic construct
ILPRVKELL

SEQ ID NO: 33956 - protein, 8 aa, synthetic construct
VIPVFNLL

SEQ ID NO: 33957 - protein, 9 aa, synthetic construct
LPPHPLSQL

SEQ ID NO: 33958 - protein, 8 aa, synthetic construct
VTPDTKAL

SEQ ID NO: 33959 - protein, 9 aa, synthetic construct
RLEQPHQQL

SEQ ID NO: 33960 - protein, 8 aa, synthetic construct
LDEETSSL

SEQ ID NO: 33961 - protein, 9 aa, synthetic construct
QSEEHLTEL

SEQ ID NO: 33962 - protein, 8 aa, synthetic construct
SMDTTKTV

SEQ ID NO: 33963 - protein, 8 aa, synthetic construct
KGEFPPYL

SEQ ID NO: 33964 - protein, 9 aa, synthetic construct
RSEEAVPAL

SEQ ID NO: 33965 - protein, 9 aa, synthetic construct
YSDYHPGTF

SEQ ID NO: 33966 - protein, 8 aa, synthetic construct
YDLISQYM

SEQ ID NO: 33967 - protein, 9 aa, synthetic construct
VPDSEQLKI

SEQ ID NO: 33968 - protein, 9 aa, synthetic construct
QTDTTKTVL

SEQ ID NO: 33969 - protein, 9 aa, synthetic construct
KLDDDSKLV

SEQ ID NO: 33970 - protein, 8 aa, synthetic construct
YSEAYGRM

SEQ ID NO: 33971 - protein, 9 aa, synthetic construct
FYDLISQYM

SEQ ID NO: 33972 - protein, 8 aa, synthetic construct
QSELPPSF

SEQ ID NO: 33973 - protein, 8 aa, synthetic construct
VDLHTIQF

SEQ ID NO: 33974 - protein, 9 aa, synthetic construct
QVDLHTIQF

SEQ ID NO: 33975 - protein, 9 aa, synthetic construct
LSDSNFISL

SEQ ID NO: 33976 - protein, 9 aa, synthetic construct
FLSDSNMFL

SEQ ID NO: 33977 - protein, 8 aa, synthetic construct
VPDSEQRL

SEQ ID NO: 33978 - protein, 9 aa, synthetic construct
ASDIVHSGL

SEQ ID NO: 33979 - protein, 9 aa, synthetic construct
KLEDGNIRL

SEQ ID NO: 33980 - protein, 9 aa, synthetic construct
NADAGGVIL

SEQ ID NO: 33981 - protein, 9 aa, synthetic construct
RPDNIRLAL

SEQ ID NO: 33982 - protein, 9 aa, synthetic construct
GVDLHTIQF

SEQ ID NO: 33983 - protein, 9 aa, synthetic construct
TSDTTKTVL

SEQ ID NO: 33984 - protein, 9 aa, synthetic construct
LADLDGMRI

SEQ ID NO: 33985 - protein, 8 aa, synthetic construct
MADWGFCF

SEQ ID NO: 33986 - protein, 9 aa, synthetic construct
IVRKKALPD

SEQ ID NO: 33987 - protein, 9 aa, synthetic construct
LTELRREAG

SEQ ID NO: 33988 - protein, 9 aa, synthetic construct
FSYQSTFSV

SEQ ID NO: 33989 - protein, 9 aa, synthetic construct
FNMLRHLEQ

SEQ ID NO: 33990 - protein, 9 aa, synthetic construct
YLIQIARYG

SEQ ID NO: 33991 - protein, 9 aa, synthetic construct
IVIKEPNKP

SEQ ID NO: 33992 - protein, 9 aa, synthetic construct
VYALHDVTD

SEQ ID NO: 33993 - protein, 9 aa, synthetic construct
FMRKQESQS

SEQ ID NO: 33994 - protein, 9 aa, synthetic construct
YQELTQLKS

SEQ ID NO: 33995 - protein, 9 aa, synthetic construct
FLYSKFTVD

SEQ ID NO: 33996 - protein, 9 aa, synthetic construct
IDVDKKLED

SEQ ID NO: 33997 - protein, 9 aa, synthetic construct
FKEETRLAT

SEQ ID NO: 33998 - protein, 9 aa, synthetic construct
YNKRSTITS

SEQ ID NO: 33999 - protein, 9 aa, synthetic construct
YYKANEHDA

SEQ ID NO: 34000 - protein, 9 aa, synthetic construct
FQRVEDRQD

SEQ ID NO: 34001 - protein, 9 aa, synthetic construct
YRCFSQPRH

SEQ ID NO: 34002 - protein, 9 aa, synthetic construct
MVYEGNARD

SEQ ID NO: 34003 - protein, 9 aa, synthetic construct
FAVITEDAT

SEQ ID NO: 34004 - protein, 9 aa, synthetic construct
FTIDVDKKL

SEQ ID NO: 34005 - protein, 9 aa, synthetic construct
FYNFNKFGE

SEQ ID NO: 34006 - protein, 9 aa, synthetic construct
YVPMAVGSR

SEQ ID NO: 34007 - protein, 9 aa, synthetic construct
WKGNGKLPG

SEQ ID NO: 34008 - protein, 9 aa, synthetic construct
VFVVHKPSA

SEQ ID NO: 34009 - protein, 9 aa, synthetic construct
IRLALRLES

SEQ ID NO: 34010 - protein, 9 aa, synthetic construct
LIQIARYGQ

SEQ ID NO: 34011 - protein, 9 aa, synthetic construct
FTVDKSRWQ

SEQ ID NO: 34012 - protein, 9 aa, synthetic construct
FQDRISGAS

SEQ ID NO: 34013 - protein, 9 aa, synthetic construct
FSNSSHLMG

SEQ ID NO: 34014 - protein, 9 aa, synthetic construct
FFLYSKFTV

SEQ ID NO: 34015 - protein, 9 aa, synthetic construct
YDKNGKEEV

SEQ ID NO: 34016 - protein, 9 aa, synthetic construct
FISLPRVKE

SEQ ID NO: 34017 - protein, 9 aa, synthetic construct
FNWSSTLTN

SEQ ID NO: 34018 - protein, 9 aa, synthetic construct
LARRDNIED

SEQ ID NO: 34019 - protein, 9 aa, synthetic construct
WFQRVEDRQ

SEQ ID NO: 34020 - protein, 9 aa, synthetic construct
LIGRVEASN

SEQ ID NO: 34021 - protein, 9 aa, synthetic construct
IRLLRTELQ

SEQ ID NO: 34022 - protein, 9 aa, synthetic construct
MRIENKGRM

SEQ ID NO: 34023 - protein, 9 aa, synthetic construct
YNKWSRPVA

SEQ ID NO: 34024 - protein, 9 aa, synthetic construct
IQTAVRLLL

SEQ ID NO: 34025 - protein, 9 aa, synthetic construct
FEAAGFHLN

SEQ ID NO: 34026 - protein, 9 aa, synthetic construct
VKMILKLLE

SEQ ID NO: 34027 - protein, 9 aa, synthetic construct
MQAKKKELA

SEQ ID NO: 34028 - protein, 9 aa, synthetic construct
FRNLGSLRY

SEQ ID NO: 34029 - protein, 9 aa, synthetic construct
IYFLHKIHT

SEQ ID NO: 34030 - protein, 9 aa, synthetic construct
FAGIVNSAV

SEQ ID NO: 34031 - protein, 9 aa, synthetic construct
YKANEHDAI

SEQ ID NO: 34032 - protein, 9 aa, synthetic construct
FFLEGKPKA

SEQ ID NO: 34033 - protein, 9 aa, synthetic construct
IENKRKVLG

SEQ ID NO: 34034 - protein, 9 aa, synthetic construct
LRILEQSGE

SEQ ID NO: 34035 - protein, 9 aa, synthetic construct
YQSTFSVHQ

SEQ ID NO: 34036 - protein, 9 aa, synthetic construct
LIPMNEHNA

SEQ ID NO: 34037 - protein, 9 aa, synthetic construct
VNEIIRKEF

SEQ ID NO: 34038 - protein, 9 aa, synthetic construct
TTPLPRRPQ

SEQ ID NO: 34039 - protein, 9 aa, synthetic construct
LTQLKSAVG

SEQ ID NO: 34040 - protein, 9 aa, synthetic construct
LKLLEDKNG

SEQ ID NO: 34041 - protein, 9 aa, synthetic construct
LKIVPDSEQ

SEQ ID NO: 34042 - protein, 9 aa, synthetic construct
NEIIRKEFS

SEQ ID NO: 34043 - protein, 9 aa, synthetic construct
VHCAQHGPG

SEQ ID NO: 34044 - protein, 9 aa, synthetic construct
VKMKRGKAS

SEQ ID NO: 34045 - protein, 9 aa, synthetic construct
LAALQGLKG

SEQ ID NO: 34046 - protein, 9 aa, synthetic construct
VEQLRILEQ

SEQ ID NO: 34047 - protein, 9 aa, synthetic construct
MAVGSRFAG

SEQ ID NO: 34048 - protein, 9 aa, synthetic construct
KVKMKRGKA

SEQ ID NO: 34049 - protein, 9 aa, synthetic construct
LEHLTELRR

SEQ ID NO: 34050 - protein, 9 aa, synthetic construct
LRIEKNELS

SEQ ID NO: 34051 - protein, 9 aa, synthetic construct
ISLTQKIPT

SEQ ID NO: 34052 - protein, 9 aa, synthetic construct
LRHLEQPHQ

SEQ ID NO: 34053 - protein, 9 aa, synthetic construct
LVKENNIRS

SEQ ID NO: 34054 - protein, 9 aa, synthetic construct
LHSTTPLPR

SEQ ID NO: 34055 - protein, 9 aa, synthetic construct
LFNMLRHLE

SEQ ID NO: 34056 - protein, 9 aa, synthetic construct
MACAAKNAS

SEQ ID NO: 34057 - protein, 9 aa, synthetic construct
VAEMWRRNG

SEQ ID NO: 34058 - protein, 9 aa, synthetic construct
LMGHGRIHS

SEQ ID NO: 34059 - protein, 9 aa, synthetic construct
VEEALKKLG

SEQ ID NO: 34060 - protein, 9 aa, synthetic construct
LTNHRKSYT

SEQ ID NO: 34061 - protein, 9 aa, synthetic construct
LSIENKRKV

SEQ ID NO: 34062 - protein, 9 aa, synthetic construct
LKINNKNAL

SEQ ID NO: 34063 - protein, 9 aa, synthetic construct
LNELWKNFG

SEQ ID NO: 34064 - protein, 9 aa, synthetic construct
ISGGFGGVA

SEQ ID NO: 34065 - protein, 9 aa, synthetic construct
IEDGDSMIS

SEQ ID NO: 34066 - protein, 9 aa, synthetic construct
ISGASEEDI

SEQ ID NO: 34067 - protein, 9 aa, synthetic construct
IVNSAVQTT

SEQ ID NO: 34068 - protein, 9 aa, synthetic construct
LASGRLPLA

SEQ ID NO: 34069 - protein, 9 aa, synthetic construct
CQSAAASQL

SEQ ID NO: 34070 - protein, 9 aa, synthetic construct
FYSFALDKT

SEQ ID NO: 34071 - protein, 9 aa, synthetic construct
LAKGTVQTS

SEQ ID NO: 34072 - protein, 9 aa, synthetic construct
MKRGKASSS

SEQ ID NO: 34073 - protein, 9 aa, synthetic construct
VEASNADAG

SEQ ID NO: 34074 - protein, 9 aa, synthetic construct
VAHAVAAVG

SEQ ID NO: 34075 - protein, 9 aa, synthetic construct
AGEGEARPS

SEQ ID NO: 34076 - protein, 9 aa, synthetic construct
LQTGPVPPG

SEQ ID NO: 34077 - protein, 9 aa, synthetic construct
MGHGRIHSG

SEQ ID NO: 34078 - protein, 9 aa, synthetic construct
EFSGTPARN

SEQ ID NO: 34079 - protein, 9 aa, synthetic construct
HQSGQIERG

SEQ ID NO: 34080 - protein, 9 aa, synthetic construct
PFTIDVDKK

SEQ ID NO: 34081 - protein, 9 aa, synthetic construct
YESDVVEWG

SEQ ID NO: 34082 - protein, 9 aa, synthetic construct
VTDASSVPT

SEQ ID NO: 34083 - protein, 9 aa, synthetic construct
PSFAVITED

SEQ ID NO: 34084 - protein, 9 aa, synthetic construct
VHSGLAYTM

SEQ ID NO: 34085 - protein, 9 aa, synthetic construct
SSRGQAVSS

SEQ ID NO: 34086 - protein, 9 aa, synthetic construct
LAKGTVQTG

SEQ ID NO: 34087 - protein, 9 aa, synthetic construct
IEEAVPALC

SEQ ID NO: 34088 - protein, 9 aa, synthetic construct
SNASKSNIA

SEQ ID NO: 34089 - protein, 9 aa, synthetic construct
YSFALDKTV

SEQ ID NO: 34090 - protein, 9 aa, synthetic construct
PSTQAVSFQ

SEQ ID NO: 34091 - protein, 9 aa, synthetic construct
QLIGRVEAS

SEQ ID NO: 34092 - protein, 9 aa, synthetic construct
WGSSGAASE

SEQ ID NO: 34093 - protein, 9 aa, synthetic construct
VSGSRSSPP

SEQ ID NO: 34094 - protein, 9 aa, synthetic construct
QSPAKALEG

SEQ ID NO: 34095 - protein, 9 aa, synthetic construct
IGRVEASNA

SEQ ID NO: 34096 - protein, 9 aa, synthetic construct
NARAVIMFA

SEQ ID NO: 34097 - protein, 9 aa, synthetic construct
QSAAASQLD

SEQ ID NO: 34098 - protein, 9 aa, synthetic construct
FQPDTDNRA

SEQ ID NO: 34099 - protein, 9 aa, synthetic construct
VATSAAAAA

SEQ ID NO: 34100 - protein, 9 aa, synthetic construct
VTFDDVAVH

SEQ ID NO: 34101 - protein, 9 aa, synthetic construct
VAQVVAEMW

SEQ ID NO: 34102 - protein, 9 aa, synthetic construct
RFAGIVNSA

SEQ ID NO: 34103 - protein, 9 aa, synthetic construct
VITEDATLS

SEQ ID NO: 34104 - protein, 9 aa, synthetic construct
YSGGNIVRV

SEQ ID NO: 34105 - protein, 9 aa, synthetic construct
LKPGEISND

SEQ ID NO: 34106 - protein, 9 aa, synthetic construct
PAVATSAAA

SEQ ID NO: 34107 - protein, 9 aa, synthetic construct
YSADYYKAN

SEQ ID NO: 34108 - protein, 9 aa, synthetic construct
ITSRDIQTA

SEQ ID NO: 34109 - protein, 9 aa, synthetic construct
AVSFQPDTD

SEQ ID NO: 34110 - protein, 9 aa, synthetic construct
IYSADYYKA

SEQ ID NO: 34111 - protein, 9 aa, synthetic construct
WELIQEDIL

SEQ ID NO: 34112 - protein, 9 aa, synthetic construct
LHTIQFHAE

SEQ ID NO: 34113 - protein, 9 aa, synthetic construct
FSGTPARNQ

SEQ ID NO: 34114 - protein, 9 aa, synthetic construct
SSGAASEPE

SEQ ID NO: 34115 - protein, 9 aa, synthetic construct
YNFNKFGEN

SEQ ID NO: 34116 - protein, 9 aa, synthetic construct
ARAVIMFAN

SEQ ID NO: 34117 - protein, 9 aa, synthetic construct
VSGTEYEVA

SEQ ID NO: 34118 - protein, 9 aa, synthetic construct
AVIMFANED

SEQ ID NO: 34119 - protein, 9 aa, synthetic construct
PVTFDDVAV

SEQ ID NO: 34120 - protein, 9 aa, synthetic construct
YEEISAGDE

SEQ ID NO: 34121 - protein, 9 aa, synthetic construct
TQAVSFQPD

SEQ ID NO: 34122 - protein, 9 aa, synthetic construct
IMFANEDDI

SEQ ID NO: 34123 - protein, 9 aa, synthetic construct
ADYYKANEH

SEQ ID NO: 34124 - protein, 9 aa, synthetic construct
FDDVAVHFS

SEQ ID NO: 34125 - protein, 9 aa, synthetic construct
LKGSSEAPG

SEQ ID NO: 34126 - protein, 9 aa, synthetic construct
YSEAYGRMG

SEQ ID NO: 34127 - protein, 9 aa, synthetic construct
WALFGASER

SEQ ID NO: 34128 - protein, 9 aa, synthetic construct
YEVAQSPAK

SEQ ID NO: 34129 - protein, 9 aa, synthetic construct
YTEEKPYKC

SEQ ID NO: 34130 - protein, 9 aa, synthetic construct
VSSHEQARS

SEQ ID NO: 34131 - protein, 9 aa, synthetic construct
WSSTLTNHR

SEQ ID NO: 34132 - protein, 9 aa, synthetic construct
YSKFTVDKS

SEQ ID NO: 34133 - protein, 9 aa, synthetic construct
VHGLGVPLH

SEQ ID NO: 34134 - protein, 9 aa, synthetic construct
WFKEETRLA

SEQ ID NO: 34135 - protein, 9 aa, synthetic construct
FNKFGENKY

SEQ ID NO: 34136 - protein, 9 aa, synthetic construct
WYRCYAYNS

SEQ ID NO: 34137 - protein, 9 aa, synthetic construct
YFLHKIHTN

SEQ ID NO: 34138 - protein, 9 aa, synthetic construct
VLAALLHTR

SEQ ID NO: 34139 - protein, 9 aa, synthetic construct
ASRSEFLPR

SEQ ID NO: 34140 - protein, 9 aa, synthetic construct
SGLDWTASR

SEQ ID NO: 34141 - protein, 9 aa, synthetic construct
HVLAALLHR

SEQ ID NO: 34142 - protein, 9 aa, synthetic construct
ARASEFLPR

SEQ ID NO: 34143 - protein, 9 aa, synthetic construct
GRASEFLPR

SEQ ID NO: 34144 - protein, 9 aa, synthetic construct
DSPAHVLAL

SEQ ID NO: 34145 - protein, 9 aa, synthetic construct
RPDSPAHVL

SEQ ID NO: 34146 - protein, 9 aa, synthetic construct
WTGASRASE

SEQ ID NO: 34147 - protein, 9 aa, synthetic construct
YKYEEKRKK

SEQ ID NO: 34148 - protein, 9 aa, synthetic construct
LAALLHETR

SEQ ID NO: 34149 - protein, 9 aa, synthetic construct
LLHETRAGP

SEQ ID NO: 34150 - protein, 9 aa, synthetic construct
DWTGASRAS

SEQ ID NO: 34151 - protein, 9 aa, synthetic construct
FAAGKDSGL

SEQ ID NO: 34152 - protein, 9 aa, synthetic construct
PAHVLAALL

SEQ ID NO: 34153 - protein, 9 aa, synthetic construct
AVAEDVHLL

SEQ ID NO: 34154 - protein, 9 aa, synthetic construct
AVAEDVWHL

SEQ ID NO: 34155 - protein, 9 aa, synthetic construct
RMLAFLSEV

SEQ ID NO: 34156 - protein, 9 aa, synthetic construct
AQFPETSEL

SEQ ID NO: 34157 - protein, 9 aa, synthetic construct
FLDYVTIHM

SEQ ID NO: 34158 - protein, 9 aa, synthetic construct
GLDDYVFVM

SEQ ID NO: 34159 - protein, 9 aa, synthetic construct
FLFNPAVTT

SEQ ID NO: 34160 - protein, 9 aa, synthetic construct
ALYMEGLNV

SEQ ID NO: 34161 - protein, 9 aa, synthetic construct
FMDPATFTM

SEQ ID NO: 34162 - protein, 9 aa, synthetic construct
VLFDYVMLT

SEQ ID NO: 34163 - protein, 9 aa, synthetic construct
FMYNRPIHI

SEQ ID NO: 34164 - protein, 9 aa, synthetic construct
KLQTPSALL

SEQ ID NO: 34165 - protein, 9 aa, synthetic construct
SMVPYIVRV

SEQ ID NO: 34166 - protein, 9 aa, synthetic construct
ALSWPGASR

SEQ ID NO: 34167 - protein, 9 aa, synthetic construct
RLATGMRKK

SEQ ID NO: 34168 - protein, 9 aa, synthetic construct
RALPPGASR

SEQ ID NO: 34169 - protein, 9 aa, synthetic construct
GTVQTSMTK

SEQ ID NO: 34170 - protein, 9 aa, synthetic construct
RLATGMKRK

SEQ ID NO: 34171 - protein, 9 aa, synthetic construct
TMKMGSLTK

SEQ ID NO: 34172 - protein, 8 aa, synthetic construct
ALATGMRK

SEQ ID NO: 34173 - protein, 9 aa, synthetic construct
TVQTSMTTK

SEQ ID NO: 34174 - protein, 9 aa, synthetic construct
VTFSPHIRR

SEQ ID NO: 34175 - protein, 9 aa, synthetic construct
RSIGPWTLH

SEQ ID NO: 34176 - protein, 9 aa, synthetic construct
KSSTLTTHK

SEQ ID NO: 34177 - protein, 9 aa, synthetic construct
GTMGHGLQK

SEQ ID NO: 34178 - protein, 9 aa, synthetic construct
GLIQRVVRK

SEQ ID NO: 34179 - protein, 9 aa, synthetic construct
GLIQRVVKK

SEQ ID NO: 34180 - protein, 9 aa, synthetic construct
ALATGMKHK

SEQ ID NO: 34181 - protein, 9 aa, synthetic construct
ALATGMRHK

SEQ ID NO: 34182 - protein, 9 aa, synthetic construct
RQDGKARAK

SEQ ID NO: 34183 - protein, 9 aa, synthetic construct
KTEPGLSYR

SEQ ID NO: 34184 - protein, 9 aa, synthetic construct
SALATGMRK

SEQ ID NO: 34185 - protein, 9 aa, synthetic construct
SSAPRCLGK

SEQ ID NO: 34186 - protein, 9 aa, synthetic construct
TMHGLPSQK

SEQ ID NO: 34187 - protein, 9 aa, synthetic construct
LQTPSALQK

SEQ ID NO: 34188 - protein, 9 aa, synthetic construct
FPELNRTSL

SEQ ID NO: 34189 - protein, 9 aa, synthetic construct
KPQETSADI

SEQ ID NO: 34190 - protein, 9 aa, synthetic construct
TPITSEVTM

SEQ ID NO: 34191 - protein, 8 aa, synthetic construct
TPITSEVL

SEQ ID NO: 34192 - protein, 9 aa, synthetic construct
APPPAGPSL

SEQ ID NO: 34193 - protein, 8 aa, synthetic construct
RPRRCRST

SEQ ID NO: 34194 - protein, 9 aa, synthetic construct
RPRRSTESW

SEQ ID NO: 34195 - protein, 9 aa, synthetic construct
RPRRRSTES

SEQ ID NO: 34196 - protein, 9 aa, synthetic construct
SPGPPGPSP

SEQ ID NO: 34197 - protein, 9 aa, synthetic construct
GPTEGTRGL

SEQ ID NO: 34198 - protein, 8 aa, synthetic construct
FPELNRNF

SEQ ID NO: 34199 - protein, 9 aa, synthetic construct
RPNRGPPTT

SEQ ID NO: 34200 - protein, 9 aa, synthetic construct
IPWSATSTL

SEQ ID NO: 34201 - protein, 9 aa, synthetic construct
WPASRSGGL

SEQ ID NO: 34202 - protein, 9 aa, synthetic construct
NPPPPGPSL

SEQ ID NO: 34203 - protein, 8 aa, synthetic construct
HPRPRDTT

SEQ ID NO: 34204 - protein, 9 aa, synthetic construct
YRHSVSQTF

SEQ ID NO: 34205 - protein, 9 aa, synthetic construct
VRGGSGHLL

SEQ ID NO: 34206 - protein, 9 aa, synthetic construct
IRIGIPWTL

SEQ ID NO: 34207 - protein, 9 aa, synthetic construct
RRSMVPYIV

SEQ ID NO: 34208 - protein, 8 aa, synthetic construct
IRSIGIPW

SEQ ID NO: 34209 - protein, 9 aa, synthetic construct
VRGGSGHQL

SEQ ID NO: 34210 - protein, 9 aa, synthetic construct
IQFNPAVTF

SEQ ID NO: 34211 - protein, 9 aa, synthetic construct
RHSSVSQTF

SEQ ID NO: 34212 - protein, 9 aa, synthetic construct
KRKHSGMIL

SEQ ID NO: 34213 - protein, 9 aa, synthetic construct
ERDPPKRMY

SEQ ID NO: 34214 - protein, 9 aa, synthetic construct
HALGSQPYY

SEQ ID NO: 34215 - protein, 9 aa, synthetic construct
YSSSVSQTF

SEQ ID NO: 34216 - protein, 9 aa, synthetic construct
RSEDPPMYF

SEQ ID NO: 34217 - protein, 9 aa, synthetic construct
RSDPPKRMY

SEQ ID NO: 34218 - protein, 9 aa, synthetic construct
FMDPATNMY

SEQ ID NO: 34219 - protein, 9 aa, synthetic construct
LAKGTVQTM

SEQ ID NO: 34220 - protein, 9 aa, synthetic construct
RSSSVSQTF

SEQ ID NO: 34221 - protein, 9 aa, synthetic construct
SVFPELNRF

SEQ ID NO: 34222 - protein, 8 aa, synthetic construct
LQFHGAKY

SEQ ID NO: 34223 - protein, 9 aa, synthetic construct
AAAGIPWTL

SEQ ID NO: 34224 - protein, 8 aa, synthetic construct
WHSVFPEL

SEQ ID NO: 34225 - protein, 9 aa, synthetic construct
QFFNPAVTF

SEQ ID NO: 34226 - protein, 9 aa, synthetic construct
YRHSSSQTF

SEQ ID NO: 34227 - protein, 8 aa, synthetic construct
LFNPAVTF

SEQ ID NO: 34228 - protein, 9 aa, synthetic construct
HYNPVTGIF

SEQ ID NO: 34229 - protein, 9 aa, synthetic construct
SYNPVTGIF

SEQ ID NO: 34230 - protein, 9 aa, synthetic construct
FMDPATFTY

SEQ ID NO: 34231 - protein, 9 aa, synthetic construct
SFPELNRNF

SEQ ID NO: 34232 - protein, 8 aa, synthetic construct
MRMLRAFL

SEQ ID NO: 34233 - protein, 8 aa, synthetic construct
VYRDGSAL

SEQ ID NO: 34234 - protein, 9 aa, synthetic construct
MKRKHKISG

SEQ ID NO: 34235 - protein, 9 aa, synthetic construct
FKCSSTLTT

SEQ ID NO: 34236 - protein, 9 aa, synthetic construct
FTNMYNRPI

SEQ ID NO: 34237 - protein, 9 aa, synthetic construct
YLARRRIRL

SEQ ID NO: 34238 - protein, 9 aa, synthetic construct
VTIDIRSIG

SEQ ID NO: 34239 - protein, 9 aa, synthetic construct
MRKKHKISG

SEQ ID NO: 34240 - protein, 9 aa, synthetic construct
LVLKAPLDG

SEQ ID NO: 34241 - protein, 9 aa, synthetic construct
MRMLRAFLS

SEQ ID NO: 34242 - protein, 9 aa, synthetic construct
LEAMARDPP

SEQ ID NO: 34243 - protein, 9 aa, synthetic construct
LNSLQREPD

SEQ ID NO: 34244 - protein, 9 aa, synthetic construct
YVMLTIHMG

SEQ ID NO: 34245 - protein, 9 aa, synthetic construct
VVREKKEGC

SEQ ID NO: 34246 - protein, 9 aa, synthetic construct
LSSHYRHSS

SEQ ID NO: 34247 - protein, 9 aa, synthetic construct
IAVVTKRER

SEQ ID NO: 34248 - protein, 9 aa, synthetic construct
LVYSAKRKA

SEQ ID NO: 34249 - protein, 9 aa, synthetic construct
AVVTKRERS

SEQ ID NO: 34250 - protein, 9 aa, synthetic construct
FMAAHITAN

SEQ ID NO: 34251 - protein, 9 aa, synthetic construct
VMKVEKAPQ

SEQ ID NO: 34252 - protein, 9 aa, synthetic construct
IQRVVREKK

SEQ ID NO: 34253 - protein, 9 aa, synthetic construct
LICSPTHAG

SEQ ID NO: 34254 - protein, 9 aa, synthetic construct
LTTHKRIHT

SEQ ID NO: 34255 - protein, 9 aa, synthetic construct
IRRLSGIRA

SEQ ID NO: 34256 - protein, 9 aa, synthetic construct
LGLIQRVVR

SEQ ID NO: 34257 - protein, 9 aa, synthetic construct
YSAKRKASM

SEQ ID NO: 34258 - protein, 9 aa, synthetic construct
YAAIDPSMV

SEQ ID NO: 34259 - protein, 9 aa, synthetic construct
LVTFQSPHI

SEQ ID NO: 34260 - protein, 9 aa, synthetic construct
LRAFLSEVQ

SEQ ID NO: 34261 - protein, 9 aa, synthetic construct
VCGYLARRR

SEQ ID NO: 34262 - protein, 9 aa, synthetic construct
NRNFTSLSL

SEQ ID NO: 34263 - protein, 9 aa, synthetic construct
MVPYIVRQC

SEQ ID NO: 34264 - protein, 9 aa, synthetic construct
VTVYRDGSA

SEQ ID NO: 34265 - protein, 9 aa, synthetic construct
LLQFHGAKY

SEQ ID NO: 34266 - protein, 9 aa, synthetic construct
ILVYSAKRK

SEQ ID NO: 34267 - protein, 9 aa, synthetic construct
LQLAAAVGI

SEQ ID NO: 34268 - protein, 9 aa, synthetic construct
IKTEPGLSS

SEQ ID NO: 34269 - protein, 9 aa, synthetic construct
AAKFMAAHI

SEQ ID NO: 34270 - protein, 9 aa, synthetic construct
LFREKDYKQ

SEQ ID NO: 34271 - protein, 9 aa, synthetic construct
IGGLDNQIQ

SEQ ID NO: 34272 - protein, 9 aa, synthetic construct
FHGAKYAAI

SEQ ID NO: 34273 - protein, 9 aa, synthetic construct
WHSVFPELN

SEQ ID NO: 34274 - protein, 9 aa, synthetic construct
QETSADIGG

SEQ ID NO: 34275 - protein, 9 aa, synthetic construct
VTFGTAIAA

SEQ ID NO: 34276 - protein, 9 aa, synthetic construct
IFTGHTAVA

SEQ ID NO: 34277 - protein, 9 aa, synthetic construct
GTGAQPLWG

SEQ ID NO: 34278 - protein, 9 aa, synthetic construct
MARDPPNRG

SEQ ID NO: 34279 - protein, 9 aa, synthetic construct
EAMARDPPN

SEQ ID NO: 34280 - protein, 9 aa, synthetic construct
DIGGLDNQI

SEQ ID NO: 34281 - protein, 9 aa, synthetic construct
VYRDGSALG

SEQ ID NO: 34282 - protein, 9 aa, synthetic construct
FTSAEDHED

SEQ ID NO: 34283 - protein, 9 aa, synthetic construct
TSGEDAELS

SEQ ID NO: 34284 - protein, 9 aa, synthetic construct
VDSAGSYIS

SEQ ID NO: 34285 - protein, 9 aa, synthetic construct
GHTAVAEDV

SEQ ID NO: 34286 - protein, 9 aa, synthetic construct
DTGANPPPP

SEQ ID NO: 34287 - protein, 9 aa, synthetic construct
AKYAAIDPS

SEQ ID NO: 34288 - protein, 9 aa, synthetic construct
RHSSSVSQT

SEQ ID NO: 34289 - protein, 9 aa, synthetic construct
ITANTNPFS

SEQ ID NO: 34290 - protein, 9 aa, synthetic construct
LWGVQSGSG

SEQ ID NO: 34291 - protein, 9 aa, synthetic construct
AASPEAEQF

SEQ ID NO: 34292 - protein, 9 aa, synthetic construct
SRSGGLEES

SEQ ID NO: 34293 - protein, 9 aa, synthetic construct
RAKAKTRSS

SEQ ID NO: 34294 - protein, 9 aa, synthetic construct
YRDGSALGP

SEQ ID NO: 34295 - protein, 9 aa, synthetic construct
HEAAKFMAA

SEQ ID NO: 34296 - protein, 9 aa, synthetic construct
SDEAKALQT

SEQ ID NO: 34297 - protein, 9 aa, synthetic construct
NRPIHITLD

SEQ ID NO: 34298 - protein, 9 aa, synthetic construct
LERTKLRYS

SEQ ID NO: 34299 - protein, 9 aa, synthetic construct
LTQVTVYRD

SEQ ID NO: 34300 - protein, 9 aa, synthetic construct
QTPSALLGQ

SEQ ID NO: 34301 - protein, 9 aa, synthetic construct
ETPLQLAAA

SEQ ID NO: 34302 - protein, 9 aa, synthetic construct
LSGTLSFTS

SEQ ID NO: 34303 - protein, 9 aa, synthetic construct
PEGGGGAGA

SEQ ID NO: 34304 - protein, 9 aa, synthetic construct
MKMGSLERT

SEQ ID NO: 34305 - protein, 9 aa, synthetic construct
PWSATSYTL

SEQ ID NO: 34306 - protein, 9 aa, synthetic construct
IQAGVCGYL

SEQ ID NO: 34307 - protein, 9 aa, synthetic construct
VEVDSAGSY

SEQ ID NO: 34308 - protein, 9 aa, synthetic construct
FNPAVTFGT

SEQ ID NO: 34309 - protein, 9 aa, synthetic construct
PETSELEDD

SEQ ID NO: 34310 - protein, 9 aa, synthetic construct
LYNGHSGYN

SEQ ID NO: 34311 - protein, 9 aa, synthetic construct
LQFHGAKYA

SEQ ID NO: 34312 - protein, 9 aa, synthetic construct
LSFTSAEDH

SEQ ID NO: 34313 - protein, 9 aa, synthetic construct
KARAKAKTR

SEQ ID NO: 34314 - protein, 9 aa, synthetic construct
VMPVEVDSA

SEQ ID NO: 34315 - protein, 9 aa, synthetic construct
FTGHTAVAE

SEQ ID NO: 34316 - protein, 9 aa, synthetic construct
LCWARALPS

SEQ ID NO: 34317 - protein, 8 aa, synthetic construct
AIFASHRK

SEQ ID NO: 34318 - protein, 9 aa, synthetic construct
GQAFASHRK

SEQ ID NO: 34319 - protein, 8 aa, synthetic construct
IFASHRKM

SEQ ID NO: 34320 - protein, 9 aa, synthetic construct
IKGQAIFAS

SEQ ID NO: 34321 - protein, 9 aa, synthetic construct
VDKIKGQAI

SEQ ID NO: 34322 - protein, 9 aa, synthetic construct
PGSEEEEEE

SEQ ID NO: 34323 - protein, 9 aa, synthetic construct
SLISALHYV

SEQ ID NO: 34324 - protein, 9 aa, synthetic construct
TLLDHWVEA

SEQ ID NO: 34325 - protein, 9 aa, synthetic construct
ALISALHYL

SEQ ID NO: 34326 - protein, 9 aa, synthetic construct
HLISALHYL

SEQ ID NO: 34327 - protein, 9 aa, synthetic construct
GTDEPVITV

SEQ ID NO: 34328 - protein, 9 aa, synthetic construct
ELIKQTSTF

SEQ ID NO: 34329 - protein, 9 aa, synthetic construct
CIIEHTNAF

SEQ ID NO: 34330 - protein, 9 aa, synthetic construct
VQIEVIGGY

SEQ ID NO: 34331 - protein, 9 aa, synthetic construct
NVSSLYLYY

SEQ ID NO: 34332 - protein, 9 aa, synthetic construct
TVIEVIGGY

SEQ ID NO: 34333 - protein, 9 aa, synthetic construct
QINKHSGLY

SEQ ID NO: 34334 - protein, 9 aa, synthetic construct
DILPNVSSL

SEQ ID NO: 34335 - protein, 9 aa, synthetic construct
DILPVSSLY

SEQ ID NO: 34336 - protein, 9 aa, synthetic construct
EVYFTALFY

SEQ ID NO: 34337 - protein, 8 aa, synthetic construct
EVYFTALF

SEQ ID NO: 34338 - protein, 8 aa, synthetic construct
NTKHSGLY

SEQ ID NO: 34339 - protein, 9 aa, synthetic construct
YAHSLISAY

SEQ ID NO: 34340 - protein, 9 aa, synthetic construct
DTQGEEGAY

SEQ ID NO: 34341 - protein, 9 aa, synthetic construct
SSSGDYILY

SEQ ID NO: 34342 - protein, 9 aa, synthetic construct
ILPNVSSLY

SEQ ID NO: 34343 - protein, 8 aa, synthetic construct
MASRGPAY

SEQ ID NO: 34344 - protein, 8 aa, synthetic construct
SLISALHY

SEQ ID NO: 34345 - protein, 9 aa, synthetic construct
KIHTGEKPY

SEQ ID NO: 34346 - protein, 9 aa, synthetic construct
FLWQPTREF

SEQ ID NO: 34347 - protein, 9 aa, synthetic construct
GIKSSGEVY

SEQ ID NO: 34348 - protein, 9 aa, synthetic construct
GIKSSGVYF

SEQ ID NO: 34349 - protein, 9 aa, synthetic construct
IMASRGPAY

SEQ ID NO: 34350 - protein, 9 aa, synthetic construct
AERDGNVAF

SEQ ID NO: 34351 - protein, 9 aa, synthetic construct
LIKNTTSTF

SEQ ID NO: 34352 - protein, 9 aa, synthetic construct
YAHSSALHY

SEQ ID NO: 34353 - protein, 9 aa, synthetic construct
IEHTNPAFF

SEQ ID NO: 34354 - protein, 9 aa, synthetic construct
EEKGSKLKI

SEQ ID NO: 34355 - protein, 9 aa, synthetic construct
VEIEVIGGY

SEQ ID NO: 34356 - protein, 9 aa, synthetic construct
SEKSVTQRW

SEQ ID NO: 34357 - protein, 9 aa, synthetic construct
HEAESKLKI

SEQ ID NO: 34358 - protein, 9 aa, synthetic construct
VEAEKGSKL

SEQ ID NO: 34359 - protein, 9 aa, synthetic construct
TEIEVIGGY

SEQ ID NO: 34360 - protein, 9 aa, synthetic construct
AEKGSKLKL

SEQ ID NO: 34361 - protein, 9 aa, synthetic construct
SEYGPMFTI

SEQ ID NO: 34362 - protein, 9 aa, synthetic construct
SEVYFTALF

SEQ ID NO: 34363 - protein, 8 aa, synthetic construct
TEAEPEAL

SEQ ID NO: 34364 - protein, 9 aa, synthetic construct
GEVYFTALF

SEQ ID NO: 34365 - protein, 9 aa, synthetic construct
QEIEIGGYL

SEQ ID NO: 34366 - protein, 9 aa, synthetic construct
KEWEALCAY

SEQ ID NO: 34367 - protein, 8 aa, synthetic construct
SERYGPMF

SEQ ID NO: 34368 - protein, 9 aa, synthetic construct
KEVYFTALY

SEQ ID NO: 34369 - protein, 8 aa, synthetic construct
GTDEPRVI

SEQ ID NO: 34370 - protein, 9 aa, synthetic construct
KGDDSVQVV

SEQ ID NO: 34371 - protein, 9 aa, synthetic construct
GTDEPITVL

SEQ ID NO: 34372 - protein, 8 aa, synthetic construct
LSKDHYTL

SEQ ID NO: 34373 - protein, 8 aa, synthetic construct
VSSLYLYY

SEQ ID NO: 34374 - protein, 8 aa, synthetic construct
MASRGPAY

SEQ ID NO: 34375 - protein, 8 aa, synthetic construct
FTFVYTLL

SEQ ID NO: 34376 - protein, 8 aa, synthetic construct
RASSVHNI

SEQ ID NO: 34377 - protein, 9 aa, synthetic construct
LVLLVTAQA

SEQ ID NO: 34378 - protein, 9 aa, synthetic construct
FRSASGLQK

SEQ ID NO: 34379 - protein, 9 aa, synthetic construct
LHYLVPVRP

SEQ ID NO: 34380 - protein, 9 aa, synthetic construct
FDGIQNNDL

SEQ ID NO: 34381 - protein, 9 aa, synthetic construct
IEVIGGYLA

SEQ ID NO: 34382 - protein, 9 aa, synthetic construct
LLAEGGGLG

SEQ ID NO: 34383 - protein, 9 aa, synthetic construct
LKILGPFSN

SEQ ID NO: 34384 - protein, 9 aa, synthetic construct
FQNPYAHSL

SEQ ID NO: 34385 - protein, 9 aa, synthetic construct
WEALCAYQA

SEQ ID NO: 34386 - protein, 9 aa, synthetic construct
LWQLFGPFG

SEQ ID NO: 34387 - protein, 9 aa, synthetic construct
LVTAQAAAA

SEQ ID NO: 34388 - protein, 9 aa, synthetic construct
YSAGEASDV

SEQ ID NO: 34389 - protein, 9 aa, synthetic construct
ITVLRNRQV

SEQ ID NO: 34390 - protein, 9 aa, synthetic construct
FTISQSVLV

SEQ ID NO: 34391 - protein, 9 aa, synthetic construct
VLLVTAQAA

SEQ ID NO: 34392 - protein, 9 aa, synthetic construct
FTALFPYVV

SEQ ID NO: 34393 - protein, 9 aa, synthetic construct
LRSYSAGEA

SEQ ID NO: 34394 - protein, 9 aa, synthetic construct
VECTGAHIV

SEQ ID NO: 34395 - protein, 9 aa, synthetic construct
VHNIEGFGV

SEQ ID NO: 34396 - protein, 9 aa, synthetic construct
WQLFGPFGA

SEQ ID NO: 34397 - protein, 9 aa, synthetic construct
LQKHIRTHT

SEQ ID NO: 34398 - protein, 9 aa, synthetic construct
LKNKNRLKK

SEQ ID NO: 34399 - protein, 9 aa, synthetic construct
FGVHPKNIF

SEQ ID NO: 34400 - protein, 9 aa, synthetic construct
LRFVKRHCK

SEQ ID NO: 34401 - protein, 9 aa, synthetic construct
INTKHSGLY

SEQ ID NO: 34402 - protein, 9 aa, synthetic construct
IHLGPRRVV

SEQ ID NO: 34403 - protein, 9 aa, synthetic construct
FILSSTLSK

SEQ ID NO: 34404 - protein, 9 aa, synthetic construct
IRDFTTNKC

SEQ ID NO: 34405 - protein, 9 aa, synthetic construct
IGMASRGPA

SEQ ID NO: 34406 - protein, 9 aa, synthetic construct
IEGFGVHPK

SEQ ID NO: 34407 - protein, 9 aa, synthetic construct
LIVKVSDGK

SEQ ID NO: 34408 - protein, 9 aa, synthetic construct
YTLIVKVSD

SEQ ID NO: 34409 - protein, 9 aa, synthetic construct
VITVLRNRQ

SEQ ID NO: 34410 - protein, 9 aa, synthetic construct
VKVIRDFTT

SEQ ID NO: 34411 - protein, 9 aa, synthetic construct
FTIHLGPRR

SEQ ID NO: 34412 - protein, 9 aa, synthetic construct
LYLYYDPDY

SEQ ID NO: 34413 - protein, 9 aa, synthetic construct
LYYDPDYSF

SEQ ID NO: 34414 - protein, 9 aa, synthetic construct
VSSLYLYYD

SEQ ID NO: 34415 - protein, 9 aa, synthetic construct
FHFSMDSLL

SEQ ID NO: 34416 - protein, 9 aa, synthetic construct
VQGAEDQGT

SEQ ID NO: 34417 - protein, 9 aa, synthetic construct
NVAFMSYFL

SEQ ID NO: 34418 - protein, 9 aa, synthetic construct
ILYWDVAGG

SEQ ID NO: 34419 - protein, 9 aa, synthetic construct
LQVEEDPVD

SEQ ID NO: 34420 - protein, 9 aa, synthetic construct
VYTLLDHWV

SEQ ID NO: 34421 - protein, 9 aa, synthetic construct
NNLSKDHYT

SEQ ID NO: 34422 - protein, 9 aa, synthetic construct
HYTLIVKVS

SEQ ID NO: 34423 - protein, 9 aa, synthetic construct
QTSTFTISQ

SEQ ID NO: 34424 - protein, 9 aa, synthetic construct
SRNLQVEED

SEQ ID NO: 34425 - protein, 9 aa, synthetic construct
LEHSEPTEA

SEQ ID NO: 34426 - protein, 9 aa, synthetic construct
EHSEPTEAE

SEQ ID NO: 34427 - protein, 9 aa, synthetic construct
HFSMDSLLA

SEQ ID NO: 34428 - protein, 9 aa, synthetic construct
IAGTDEPRV

SEQ ID NO: 34429 - protein, 9 aa, synthetic construct
NLQVEEDPV

SEQ ID NO: 34430 - protein, 9 aa, synthetic construct
ASSVHNIEG

SEQ ID NO: 34431 - protein, 9 aa, synthetic construct
DQGTQGEEG

SEQ ID NO: 34432 - protein, 9 aa, synthetic construct
QKHIRTHTG

SEQ ID NO: 34433 - protein, 9 aa, synthetic construct
NNSYSLHKG

SEQ ID NO: 34434 - protein, 9 aa, synthetic construct
VSNVKVIRD

SEQ ID NO: 34435 - protein, 9 aa, synthetic construct
SGSASSNSS

SEQ ID NO: 34436 - protein, 9 aa, synthetic construct
CTGAHIVAV

SEQ ID NO: 34437 - protein, 9 aa, synthetic construct
NRGASLLAR

SEQ ID NO: 34438 - protein, 9 aa, synthetic construct
IVAVPTPLP

SEQ ID NO: 34439 - protein, 9 aa, synthetic construct
HTFSWATAM

SEQ ID NO: 34440 - protein, 9 aa, synthetic construct
FTAANHTTF

SEQ ID NO: 34441 - protein, 9 aa, synthetic construct
QEGDKKGQF

SEQ ID NO: 34442 - protein, 8 aa, synthetic construct
TAANHTTF

SEQ ID NO: 34443 - protein, 9 aa, synthetic construct
VGIYRVSGR

SEQ ID NO: 34444 - protein, 9 aa, synthetic construct
TFSWATAMA

SEQ ID NO: 34445 - protein, 9 aa, synthetic construct
MEEVGIYRV

SEQ ID NO: 34446 - protein, 9 aa, synthetic construct
LRDPDSHIV

SEQ ID NO: 34447 - protein, 9 aa, synthetic construct
LQACKLAQA

SEQ ID NO: 34448 - protein, 9 aa, synthetic construct
QIGSESLQA

SEQ ID NO: 34449 - protein, 9 aa, synthetic construct
ILSPGYLSY

SEQ ID NO: 34450 - protein, 9 aa, synthetic construct
GLRNMAVVK

SEQ ID NO: 34451 - protein, 9 aa, synthetic construct
HLVSQSLNK

SEQ ID NO: 34452 - protein, 9 aa, synthetic construct
SLGRAQQRK

SEQ ID NO: 34453 - protein, 9 aa, synthetic construct
GTYPGIADR

SEQ ID NO: 34454 - protein, 9 aa, synthetic construct
LSYPPFMGH

SEQ ID NO: 34455 - protein, 9 aa, synthetic construct
KTQFVHLKR

SEQ ID NO: 34456 - protein, 9 aa, synthetic construct
ASYDSGLRR

SEQ ID NO: 34457 - protein, 9 aa, synthetic construct
VVKHNIMIK

SEQ ID NO: 34458 - protein, 9 aa, synthetic construct
LSRPQLPGK

SEQ ID NO: 34459 - protein, 9 aa, synthetic construct
QLRPQLPGK

SEQ ID NO: 34460 - protein, 9 aa, synthetic construct
VTAQRIVSK

SEQ ID NO: 34461 - protein, 9 aa, synthetic construct
YIKYVNLEK

SEQ ID NO: 34462 - protein, 9 aa, synthetic construct
RAQRKGILK

SEQ ID NO: 34463 - protein, 9 aa, synthetic construct
QLRNIAVAK

SEQ ID NO: 34464 - protein, 9 aa, synthetic construct
SLAPLLLHR

SEQ ID NO: 34465 - protein, 9 aa, synthetic construct
TINEYKMHK

SEQ ID NO: 34466 - protein, 9 aa, synthetic construct
ALRNAVVKH

SEQ ID NO: 34467 - protein, 9 aa, synthetic construct
AMYRGQSHK

SEQ ID NO: 34468 - protein, 9 aa, synthetic construct
AMYRAGQSH

SEQ ID NO: 34469 - protein, 9 aa, synthetic construct
MLYPPFMGH

SEQ ID NO: 34470 - protein, 9 aa, synthetic construct
GLRNMAVPK

SEQ ID NO: 34471 - protein, 9 aa, synthetic construct
KMHEVASKY

SEQ ID NO: 34472 - protein, 9 aa, synthetic construct
VVYKSQMQK

SEQ ID NO: 34473 - protein, 9 aa, synthetic construct
LVSQSLNKK

SEQ ID NO: 34474 - protein, 9 aa, synthetic construct
LVTESQLNK

SEQ ID NO: 34475 - protein, 9 aa, synthetic construct
GLRNIAVAK

SEQ ID NO: 34476 - protein, 9 aa, synthetic construct
AQQRKGILK

SEQ ID NO: 34477 - protein, 9 aa, synthetic construct
GLTNMAVAK

SEQ ID NO: 34478 - protein, 9 aa, synthetic construct
LLHPPRVTR

SEQ ID NO: 34479 - protein, 9 aa, synthetic construct
VTSQSLNKK

SEQ ID NO: 34480 - protein, 9 aa, synthetic construct
TQFVHLRHK

SEQ ID NO: 34481 - protein, 9 aa, synthetic construct
KSMEDQKYK

SEQ ID NO: 34482 - protein, 9 aa, synthetic construct
VLNGSQLSR

SEQ ID NO: 34483 - protein, 9 aa, synthetic construct
KVFQVLNKK

SEQ ID NO: 34484 - protein, 9 aa, synthetic construct
ASYDSGLER

SEQ ID NO: 34485 - protein, 9 aa, synthetic construct
ATLPEVVYK

SEQ ID NO: 34486 - protein, 9 aa, synthetic construct
SLNKKATTK

SEQ ID NO: 34487 - protein, 9 aa, synthetic construct
ATAQRIVSK

SEQ ID NO: 34488 - protein, 9 aa, synthetic construct
NIISTVQQF

SEQ ID NO: 34489 - protein, 9 aa, synthetic construct
QVNEKKHIY

SEQ ID NO: 34490 - protein, 9 aa, synthetic construct
STPNGRLLF

SEQ ID NO: 34491 - protein, 9 aa, synthetic construct
NVSGGTTTY

SEQ ID NO: 34492 - protein, 9 aa, synthetic construct
MLTDPSQAW

SEQ ID NO: 34493 - protein, 9 aa, synthetic construct
SVIPTPHHL

SEQ ID NO: 34494 - protein, 9 aa, synthetic construct
HAVQLILLY

SEQ ID NO: 34495 - protein, 9 aa, synthetic construct
SVIPPHHYL

SEQ ID NO: 34496 - protein, 9 aa, synthetic construct
VVIPTPHHY

SEQ ID NO: 34497 - protein, 9 aa, synthetic construct
LTDPGSQAW

SEQ ID NO: 34498 - protein, 9 aa, synthetic construct
DTAQIVSKY

SEQ ID NO: 34499 - protein, 9 aa, synthetic construct
DVVLNGSQL

SEQ ID NO: 34500 - protein, 9 aa, synthetic construct
HAAEEASSY

SEQ ID NO: 34501 - protein, 9 aa, synthetic construct
QIVELQQCW

SEQ ID NO: 34502 - protein, 9 aa, synthetic construct
NIAELQAYF

SEQ ID NO: 34503 - protein, 9 aa, synthetic construct
TTYPGIARM

SEQ ID NO: 34504 - protein, 9 aa, synthetic construct
ETKENHNNY

SEQ ID NO: 34505 - protein, 9 aa, synthetic construct
EANNQTLSY

SEQ ID NO: 34506 - protein, 9 aa, synthetic construct
YAFIPEASY

SEQ ID NO: 34507 - protein, 9 aa, synthetic construct
EIKNINGNW

SEQ ID NO: 34508 - protein, 9 aa, synthetic construct
WLRGGLVLY

SEQ ID NO: 34509 - protein, 9 aa, synthetic construct
LLFGDPLAF

SEQ ID NO: 34510 - protein, 9 aa, synthetic construct
QLNEKKHIY

SEQ ID NO: 34511 - protein, 9 aa, synthetic construct
NLSGGTTTY

SEQ ID NO: 34512 - protein, 9 aa, synthetic construct
GIALELQAY

SEQ ID NO: 34513 - protein, 9 aa, synthetic construct
AIALELQAY

SEQ ID NO: 34514 - protein, 9 aa, synthetic construct
NVLGGTTTY

SEQ ID NO: 34515 - protein, 9 aa, synthetic construct
WQHRPGAAL

SEQ ID NO: 34516 - protein, 9 aa, synthetic construct
VQSGSGHQL

SEQ ID NO: 34517 - protein, 9 aa, synthetic construct
IISTVQQAF

SEQ ID NO: 34518 - protein, 9 aa, synthetic construct
IMRAVMDAY

SEQ ID NO: 34519 - protein, 9 aa, synthetic construct
KMHKEVASY

SEQ ID NO: 34520 - protein, 9 aa, synthetic construct
KMKEVASKY

SEQ ID NO: 34521 - protein, 9 aa, synthetic construct
RAFIPEASY

SEQ ID NO: 34522 - protein, 9 aa, synthetic construct
HAAEASSEY

SEQ ID NO: 34523 - protein, 9 aa, synthetic construct
LLKAAVLQY

SEQ ID NO: 34524 - protein, 9 aa, synthetic construct
VILSPGDSY

SEQ ID NO: 34525 - protein, 9 aa, synthetic construct
KANQTLDSY

SEQ ID NO: 34526 - protein, 9 aa, synthetic construct
FQNEKKHIY

SEQ ID NO: 34527 - protein, 8 aa, synthetic construct
SQMEDQKY

SEQ ID NO: 34528 - protein, 9 aa, synthetic construct
AQLAGNIAL

SEQ ID NO: 34529 - protein, 8 aa, synthetic construct
AQRIVSKY

SEQ ID NO: 34530 - protein, 9 aa, synthetic construct
APIPGQASL

SEQ ID NO: 34531 - protein, 9 aa, synthetic construct
NAEEASSEY

SEQ ID NO: 34532 - protein, 9 aa, synthetic construct
SPNGRDLLF

SEQ ID NO: 34533 - protein, 9 aa, synthetic construct
APKENHNNY

SEQ ID NO: 34534 - protein, 8 aa, synthetic construct
SPGYLDSY

SEQ ID NO: 34535 - protein, 9 aa, synthetic construct
VPIPTPHHY

SEQ ID NO: 34536 - protein, 8 aa, synthetic construct
AAVLQYLY

SEQ ID NO: 34537 - protein, 8 aa, synthetic construct
DPYGSQAW

SEQ ID NO: 34538 - protein, 9 aa, synthetic construct
DAQRIVSKY

SEQ ID NO: 34539 - protein, 9 aa, synthetic construct
IPVSSSSTL

SEQ ID NO: 34540 - protein, 8 aa, synthetic construct
EPMESYFL

SEQ ID NO: 34541 - protein, 9 aa, synthetic construct
GPFEEIQVL

SEQ ID NO: 34542 - protein, 9 aa, synthetic construct
EPKENHNNY

SEQ ID NO: 34543 - protein, 9 aa, synthetic construct
KADNQTLSY

SEQ ID NO: 34544 - protein, 9 aa, synthetic construct
LPEFVVSQM

SEQ ID NO: 34545 - protein, 8 aa, synthetic construct
YLDSYPNL

SEQ ID NO: 34546 - protein, 8 aa, synthetic construct
IAVAKHNL

SEQ ID NO: 34547 - protein, 8 aa, synthetic construct
SSASSSTL

SEQ ID NO: 34548 - protein, 9 aa, synthetic construct
MAVPKHNLM

SEQ ID NO: 34549 - protein, 8 aa, synthetic construct
QTQPPGAL

SEQ ID NO: 34550 - protein, 9 aa, synthetic construct
YLDSPNLQM

SEQ ID NO: 34551 - protein, 8 aa, synthetic construct
HAVQLLIL

SEQ ID NO: 34552 - protein, 8 aa, synthetic construct
LVLNGSQL

SEQ ID NO: 34553 - protein, 8 aa, synthetic construct
KAAVLQYL

SEQ ID NO: 34554 - protein, 8 aa, synthetic construct
MAVPKHNL

SEQ ID NO: 34555 - protein, 9 aa, synthetic construct
FVQSGRPQL

SEQ ID NO: 34556 - protein, 8 aa, synthetic construct
VLYHAVQL

SEQ ID NO: 34557 - protein, 8 aa, synthetic construct
FVVYKSQM

SEQ ID NO: 34558 - protein, 9 aa, synthetic construct
GFDPQGALI

SEQ ID NO: 34559 - protein, 8 aa, synthetic construct
YLDSYPNL

SEQ ID NO: 34560 - protein, 9 aa, synthetic construct
HYEPMESYL

SEQ ID NO: 34561 - protein, 8 aa, synthetic construct
SYDSGLEV

SEQ ID NO: 34562 - protein, 8 aa, synthetic construct
LYDPCRSA

SEQ ID NO: 34563 - protein, 8 aa, synthetic construct
LRDERELL

SEQ ID NO: 34564 - protein, 9 aa, synthetic construct
SVPTPHHYL

SEQ ID NO: 34565 - protein, 9 aa, synthetic construct
VPSPTPHHY

SEQ ID NO: 34566 - protein, 9 aa, synthetic construct
LYDPRSADI

SEQ ID NO: 34567 - protein, 8 aa, synthetic construct
VADTAQRI

SEQ ID NO: 34568 - protein, 9 aa, synthetic construct
TFDYFGVCL

SEQ ID NO: 34569 - protein, 9 aa, synthetic construct
FVQLSGRPQ

SEQ ID NO: 34570 - protein, 9 aa, synthetic construct
YAIKYVNLE

SEQ ID NO: 34571 - protein, 9 aa, synthetic construct
WLGVRGGLV

SEQ ID NO: 34572 - protein, 9 aa, synthetic construct
YEPMESYFL

SEQ ID NO: 34573 - protein, 9 aa, synthetic construct
FVVLGNNID

SEQ ID NO: 34574 - protein, 9 aa, synthetic construct
FDPQGALRN

SEQ ID NO: 34575 - protein, 9 aa, synthetic construct
YIQAKDKGA

SEQ ID NO: 34576 - protein, 9 aa, synthetic construct
YIMLSGYPP

SEQ ID NO: 34577 - protein, 9 aa, synthetic construct
ISCVAENLV

SEQ ID NO: 34578 - protein, 9 aa, synthetic construct
YVNLEEANN

SEQ ID NO: 34579 - protein, 9 aa, synthetic construct
FVVYKSQME

SEQ ID NO: 34580 - protein, 9 aa, synthetic construct
LATLPEFVV

SEQ ID NO: 34581 - protein, 9 aa, synthetic construct
FLKETSHES

SEQ ID NO: 34582 - protein, 9 aa, synthetic construct
YKMHKEVAS

SEQ ID NO: 34583 - protein, 9 aa, synthetic construct
WWREGTVAV

SEQ ID NO: 34584 - protein, 9 aa, synthetic construct
YRAMGQSHK

SEQ ID NO: 34585 - protein, 9 aa, synthetic construct
LAKQLAGNI

SEQ ID NO: 34586 - protein, 9 aa, synthetic construct
FQVLNEKKH

SEQ ID NO: 34587 - protein, 9 aa, synthetic construct
FIPEASYDS

SEQ ID NO: 34588 - protein, 9 aa, synthetic construct
IYAIKYVNL

SEQ ID NO: 34589 - protein, 9 aa, synthetic construct
YEEEEEVQA

SEQ ID NO: 34590 - protein, 9 aa, synthetic construct
YMLTDPYGS

SEQ ID NO: 34591 - protein, 9 aa, synthetic construct
FGQTAGWQH

SEQ ID NO: 34592 - protein, 9 aa, synthetic construct
FGGFDPQGA

SEQ ID NO: 34593 - protein, 9 aa, synthetic construct
LNIMIKRYN

SEQ ID NO: 34594 - protein, 9 aa, synthetic construct
VILSPGYLD

SEQ ID NO: 34595 - protein, 9 aa, synthetic construct
MAASCRLEE

SEQ ID NO: 34596 - protein, 9 aa, synthetic construct
IQQLEKSDA

SEQ ID NO: 34597 - protein, 9 aa, synthetic construct
IYIQAKDKG

SEQ ID NO: 34598 - protein, 9 aa, synthetic construct
IDLENRQVA

SEQ ID NO: 34599 - protein, 9 aa, synthetic construct
FAETPKENH

SEQ ID NO: 34600 - protein, 9 aa, synthetic construct
FVHLKRHKR

SEQ ID NO: 34601 - protein, 9 aa, synthetic construct
YVNLEKADN

SEQ ID NO: 34602 - protein, 9 aa, synthetic construct
WISASSINE

SEQ ID NO: 34603 - protein, 9 aa, synthetic construct
FTQFVHLKR

SEQ ID NO: 34604 - protein, 9 aa, synthetic construct
YFLKETSHE

SEQ ID NO: 34605 - protein, 9 aa, synthetic construct
WGLHTRAYE

SEQ ID NO: 34606 - protein, 9 aa, synthetic construct
IQAKDKGAS

SEQ ID NO: 34607 - protein, 9 aa, synthetic construct
IAVAKHNLN

SEQ ID NO: 34608 - protein, 9 aa, synthetic construct
YRCVIRSDG

SEQ ID NO: 34609 - protein, 9 aa, synthetic construct
LETLPELRD

SEQ ID NO: 34610 - protein, 9 aa, synthetic construct
VVYKSQMED

SEQ ID NO: 34611 - protein, 9 aa, synthetic construct
LRITNISSD

SEQ ID NO: 34612 - protein, 9 aa, synthetic construct
ILINNIPDE

SEQ ID NO: 34613 - protein, 9 aa, synthetic construct
VVRNRRLGV

SEQ ID NO: 34614 - protein, 9 aa, synthetic construct
TRAYEDTAD

SEQ ID NO: 34615 - protein, 9 aa, synthetic construct
QVSAEVQFR

SEQ ID NO: 34616 - protein, 9 aa, synthetic construct
VSVADTAQR

SEQ ID NO: 34617 - protein, 9 aa, synthetic construct
AAAATPAAA

SEQ ID NO: 34618 - protein, 9 aa, synthetic construct
WREGTVAVR

SEQ ID NO: 34619 - protein, 9 aa, synthetic construct
IKYVNLEEA

SEQ ID NO: 34620 - protein, 9 aa, synthetic construct
NHAAEEASS

SEQ ID NO: 34621 - protein, 9 aa, synthetic construct
HSRSRSASS

SEQ ID NO: 34622 - protein, 9 aa, synthetic construct
RSHSRSRSA

SEQ ID NO: 34623 - protein, 9 aa, synthetic construct
DKGASPEGA

SEQ ID NO: 34624 - protein, 9 aa, synthetic construct
INGNWISAS

SEQ ID NO: 34625 - protein, 9 aa, synthetic construct
VRGGLVLYN

SEQ ID NO: 34626 - protein, 9 aa, synthetic construct
ETAAAATPA

SEQ ID NO: 34627 - protein, 9 aa, synthetic construct
SRSASSNSR

SEQ ID NO: 34628 - protein, 9 aa, synthetic construct
EENAGTEEI

SEQ ID NO: 34629 - protein, 9 aa, synthetic construct
ATEAENVPS

SEQ ID NO: 34630 - protein, 9 aa, synthetic construct
ATPAAAASS

SEQ ID NO: 34631 - protein, 9 aa, synthetic construct
QHVTHSDIS

SEQ ID NO: 34632 - protein, 9 aa, synthetic construct
PYGSQAWLG

SEQ ID NO: 34633 - protein, 9 aa, synthetic construct
SGGTTTYPG

SEQ ID NO: 34634 - protein, 9 aa, synthetic construct
ISASSINEA

SEQ ID NO: 34635 - protein, 9 aa, synthetic construct
TTTATTTGS

SEQ ID NO: 34636 - protein, 9 aa, synthetic construct
IHLVTESQS

SEQ ID NO: 34637 - protein, 9 aa, synthetic construct
ERATEAENV

SEQ ID NO: 34638 - protein, 9 aa, synthetic construct
AAASSSAAS

SEQ ID NO: 34639 - protein, 9 aa, synthetic construct
PQGALTNMA

SEQ ID NO: 34640 - protein, 9 aa, synthetic construct
AAAASSSAA

SEQ ID NO: 34641 - protein, 9 aa, synthetic construct
TTGSETTTA

SEQ ID NO: 34642 - protein, 9 aa, synthetic construct
LEKSDAEYN

SEQ ID NO: 34643 - protein, 9 aa, synthetic construct
YRWAFIPEA

SEQ ID NO: 34644 - protein, 9 aa, synthetic construct
LLFGFDPLA

SEQ ID NO: 34645 - protein, 9 aa, synthetic construct
LRNIAVAKH

SEQ ID NO: 34646 - protein, 9 aa, synthetic construct
VTHSDISDP

SEQ ID NO: 34647 - protein, 9 aa, synthetic construct
VRGDPGGER

SEQ ID NO: 34648 - protein, 9 aa, synthetic construct
LRNMAVPKH

SEQ ID NO: 34649 - protein, 9 aa, synthetic construct
IEDGSTPNG

SEQ ID NO: 34650 - protein, 9 aa, synthetic construct
RNMAVVKHN

SEQ ID NO: 34651 - protein, 9 aa, synthetic construct
IKYVNLEKA

SEQ ID NO: 34652 - protein, 9 aa, synthetic construct
HVTHSDISD

SEQ ID NO: 34653 - protein, 9 aa, synthetic construct
QLSARAADG

SEQ ID NO: 34654 - protein, 9 aa, synthetic construct
RWAFIPEAS

SEQ ID NO: 34655 - protein, 9 aa, synthetic construct
LDSYRNEIA

SEQ ID NO: 34656 - protein, 9 aa, synthetic construct
VDTFQDYFG

SEQ ID NO: 34657 - protein, 9 aa, synthetic construct
NTNINEYKM

SEQ ID NO: 34658 - protein, 9 aa, synthetic construct
LDSYPNLQM

SEQ ID NO: 34659 - protein, 9 aa, synthetic construct
MDAYLVEQN

SEQ ID NO: 34660 - protein, 9 aa, synthetic construct
INEYKMHKE

SEQ ID NO: 34661 - protein, 9 aa, synthetic construct
SRAVMDAYL

SEQ ID NO: 34662 - protein, 9 aa, synthetic construct
INNIPDESQ

SEQ ID NO: 34663 - protein, 9 aa, synthetic construct
DAEYNNSPL

SEQ ID NO: 34664 - protein, 9 aa, synthetic construct
HNNYRTLLE

SEQ ID NO: 34665 - protein, 9 aa, synthetic construct
YFGVCLEPV

SEQ ID NO: 34666 - protein, 9 aa, synthetic construct
MESYFLKET

SEQ ID NO: 34667 - protein, 9 aa, synthetic construct
WYGQEIVEL

SEQ ID NO: 34668 - protein, 9 aa, synthetic construct
WRVYDVLVL

SEQ ID NO: 34669 - protein, 9 aa, synthetic construct
YQNWRVYDV

SEQ ID NO: 34670 - protein, 9 aa, synthetic construct
LHDWYGQEI

SEQ ID NO: 34671 - protein, 9 aa, synthetic construct
EEEYEDDAY

SEQ ID NO: 34672 - protein, 9 aa, synthetic construct
PEGAHCKVL

SEQ ID NO: 34673 - protein, 9 aa, synthetic construct
PAAAASSSA

SEQ ID NO: 34674 - protein, 9 aa, synthetic construct
CRSADIALV

SEQ ID NO: 34675 - protein, 9 aa, synthetic construct
IMGSRAVMD

SEQ ID NO: 34676 - protein, 9 aa, synthetic construct
TGDAGAPPV

SEQ ID NO: 34677 - protein, 9 aa, synthetic construct
PGQASLLQA

SEQ ID NO: 34678 - protein, 9 aa, synthetic construct
ILWVQAMYR

SEQ ID NO: 34679 - protein, 9 aa, synthetic construct
LRDERELLR

SEQ ID NO: 34680 - protein, 9 aa, synthetic construct
ITNISSDDC

SEQ ID NO: 34681 - protein, 9 aa, synthetic construct
VSKYRCVIR

SEQ ID NO: 34682 - protein, 9 aa, synthetic construct
TVAVRGDPG

SEQ ID NO: 34683 - protein, 9 aa, synthetic construct
VLGNNIDLE

SEQ ID NO: 34684 - protein, 9 aa, synthetic construct
GSQLPGVKY

SEQ ID NO: 34685 - protein, 9 aa, synthetic construct
REEYSAMQY

SEQ ID NO: 34686 - protein, 9 aa, synthetic construct
SGGPLMHHY

SEQ ID NO: 34687 - protein, 9 aa, synthetic construct
ALGGDGQAY

SEQ ID NO: 34688 - protein, 9 aa, synthetic construct
VSSEQPQSY

SEQ ID NO: 34689 - protein, 9 aa, synthetic construct
IANNGGLKY

SEQ ID NO: 34690 - protein, 9 aa, synthetic construct
ELPHLNTRY

SEQ ID NO: 34691 - protein, 9 aa, synthetic construct
LSMGGEQVY

SEQ ID NO: 34692 - protein, 9 aa, synthetic construct
YTMAYTLTY

SEQ ID NO: 34693 - protein, 9 aa, synthetic construct
ILDTAGEEY

SEQ ID NO: 34694 - protein, 9 aa, synthetic construct
TEEKPDEEY

SEQ ID NO: 34695 - protein, 9 aa, synthetic construct
LDQEVALLY

SEQ ID NO: 34696 - protein, 9 aa, synthetic construct
SSAYVHCCY

SEQ ID NO: 34697 - protein, 9 aa, synthetic construct
FVTLAGSEY

SEQ ID NO: 34698 - protein, 9 aa, synthetic construct
VTDPQGMVT

SEQ ID NO: 34699 - protein, 9 aa, synthetic construct
GSQLAPEHY

SEQ ID NO: 34700 - protein, 9 aa, synthetic construct
TSGGPLMHY

SEQ ID NO: 34701 - protein, 9 aa, synthetic construct
TTDYLHLLH

SEQ ID NO: 34702 - protein, 9 aa, synthetic construct
LSFSGYTPY

SEQ ID NO: 34703 - protein, 9 aa, synthetic construct
MDAEEGRIY

SEQ ID NO: 34704 - protein, 8 aa, synthetic construct
ITDVDLIY

SEQ ID NO: 34705 - protein, 8 aa, synthetic construct
SSEQPQSY

SEQ ID NO: 34706 - protein, 9 aa, synthetic construct
SCHPYSAFY

SEQ ID NO: 34707 - protein, 9 aa, synthetic construct
IFDRTDIQY

SEQ ID NO: 34708 - protein, 9 aa, synthetic construct
FQIYETLRY

SEQ ID NO: 34709 - protein, 8 aa, synthetic construct
LTDSCHPY

SEQ ID NO: 34710 - protein, 9 aa, synthetic construct
YALGDGQAY

SEQ ID NO: 34711 - protein, 9 aa, synthetic construct
QIDRTDIQY

SEQ ID NO: 34712 - protein, 8 aa, synthetic construct
GSDVGGGY

SEQ ID NO: 34713 - protein, 8 aa, synthetic construct
VTLAGSEY

SEQ ID NO: 34714 - protein, 9 aa, synthetic construct
ILSDVGGGY

SEQ ID NO: 34715 - protein, 8 aa, synthetic construct
VTDIPQGM

SEQ ID NO: 34716 - protein, 9 aa, synthetic construct
VSTDVDLIY

SEQ ID NO: 34717 - protein, 9 aa, synthetic construct
LISDVGGGY

SEQ ID NO: 34718 - protein, 8 aa, synthetic construct
DTAGREEY

SEQ ID NO: 34719 - protein, 9 aa, synthetic construct
QIETLRPRY

SEQ ID NO: 34720 - protein, 8 aa, synthetic construct
IMAYTLTY

SEQ ID NO: 34721 - protein, 9 aa, synthetic construct
CLELTDSCY

SEQ ID NO: 34722 - protein, 9 aa, synthetic construct
YSDQEVALL

SEQ ID NO: 34723 - protein, 9 aa, synthetic construct
DVDLIQNEF

SEQ ID NO: 34724 - protein, 9 aa, synthetic construct
LGDKLYALY

SEQ ID NO: 34725 - protein, 9 aa, synthetic construct
LTPSSASAY

SEQ ID NO: 34726 - protein, 9 aa, synthetic construct
DSCHPSAFY

SEQ ID NO: 34727 - protein, 9 aa, synthetic construct
RIESLINRY

SEQ ID NO: 34728 - protein, 8 aa, synthetic construct
FDDDTGRY

SEQ ID NO: 34729 - protein, 9 aa, synthetic construct
TADYLHLLH

SEQ ID NO: 34730 - protein, 9 aa, synthetic construct
LSDKGTLQF

SEQ ID NO: 34731 - protein, 9 aa, synthetic construct
DVFSIELFY

SEQ ID NO: 34732 - protein, 9 aa, synthetic construct
EADDDTGRY

SEQ ID NO: 34733 - protein, 9 aa, synthetic construct
VVSDVDLIY

SEQ ID NO: 34734 - protein, 9 aa, synthetic construct
DQEVALLSY

SEQ ID NO: 34735 - protein, 9 aa, synthetic construct
KMMDFLIPV

SEQ ID NO: 34736 - protein, 9 aa, synthetic construct
ALYDGQAYL

SEQ ID NO: 34737 - protein, 9 aa, synthetic construct
SVLESPVLI

SEQ ID NO: 34738 - protein, 9 aa, synthetic construct
SLKENLPQI

SEQ ID NO: 34739 - protein, 9 aa, synthetic construct
ALLSAIIEM

SEQ ID NO: 34740 - protein, 9 aa, synthetic construct
YLVPITHTL

SEQ ID NO: 34741 - protein, 9 aa, synthetic construct
FLLSGTPYT

SEQ ID NO: 34742 - protein, 9 aa, synthetic construct
AMYDLDEFL

SEQ ID NO: 34743 - protein, 9 aa, synthetic construct
AILGQPPNV

SEQ ID NO: 34744 - protein, 9 aa, synthetic construct
KLLNIIQDL

SEQ ID NO: 34745 - protein, 9 aa, synthetic construct
YLDQEVALL

SEQ ID NO: 34746 - protein, 9 aa, synthetic construct
QLAPEKHYI

SEQ ID NO: 34747 - protein, 9 aa, synthetic construct
SLDQEVALL

SEQ ID NO: 34748 - protein, 9 aa, synthetic construct
GVLESPVLL

SEQ ID NO: 34749 - protein, 9 aa, synthetic construct
YMYGLALTV

SEQ ID NO: 34750 - protein, 9 aa, synthetic construct
QLLSAIQEI

SEQ ID NO: 34751 - protein, 9 aa, synthetic construct
YLDPGDGSL

SEQ ID NO: 34752 - protein, 9 aa, synthetic construct
GMLPVPPAA

SEQ ID NO: 34753 - protein, 9 aa, synthetic construct
GMLPALPPA

SEQ ID NO: 34754 - protein, 9 aa, synthetic construct
MLAGPHQTL

SEQ ID NO: 34755 - protein, 9 aa, synthetic construct
VLGDKLYAL

SEQ ID NO: 34756 - protein, 9 aa, synthetic construct
MMVPGNATV

SEQ ID NO: 34757 - protein, 9 aa, synthetic construct
FLGGGLHPA

SEQ ID NO: 34758 - protein, 9 aa, synthetic construct
MMPDFLIPV

SEQ ID NO: 34759 - protein, 9 aa, synthetic construct
CLLDKLYAL

SEQ ID NO: 34760 - protein, 9 aa, synthetic construct
FVLESPVLL

SEQ ID NO: 34761 - protein, 9 aa, synthetic construct
TLGELRPEV

SEQ ID NO: 34762 - protein, 9 aa, synthetic construct
YLAGSEYFL

SEQ ID NO: 34763 - protein, 9 aa, synthetic construct
ILIDGILVA

SEQ ID NO: 34764 - protein, 9 aa, synthetic construct
YTHEEISFV

SEQ ID NO: 34765 - protein, 9 aa, synthetic construct
LLVSGGEQV

SEQ ID NO: 34766 - protein, 8 aa, synthetic construct
KLENIATL

SEQ ID NO: 34767 - protein, 8 aa, synthetic construct
VLESPVLL

SEQ ID NO: 34768 - protein, 9 aa, synthetic construct
KLVPQINLA

SEQ ID NO: 34769 - protein, 9 aa, synthetic construct
FMWTKLENI

SEQ ID NO: 34770 - protein, 9 aa, synthetic construct
VLAGSEYFL

SEQ ID NO: 34771 - protein, 9 aa, synthetic construct
RLNGDLLEA

SEQ ID NO: 34772 - protein, 9 aa, synthetic construct
FLANVAHRV

SEQ ID NO: 34773 - protein, 9 aa, synthetic construct
FLDNYMTEL

SEQ ID NO: 34774 - protein, 8 aa, synthetic construct
KLDQEVAL

SEQ ID NO: 34775 - protein, 9 aa, synthetic construct
TLISSVLQA

SEQ ID NO: 34776 - protein, 9 aa, synthetic construct
HLFQIYETL

SEQ ID NO: 34777 - protein, 9 aa, synthetic construct
TLAGSEFLL

SEQ ID NO: 34778 - protein, 9 aa, synthetic construct
TLADHLLHA

SEQ ID NO: 34779 - protein, 9 aa, synthetic construct
TLADYLHLL

SEQ ID NO: 34780 - protein, 8 aa, synthetic construct
WLLPPVTL

SEQ ID NO: 34781 - protein, 9 aa, synthetic construct
RLDGSQLKV

SEQ ID NO: 34782 - protein, 9 aa, synthetic construct
KPKLAHFAI

SEQ ID NO: 34783 - protein, 9 aa, synthetic construct
RPRSTSSSG

SEQ ID NO: 34784 - protein, 9 aa, synthetic construct
SPLMHSHYF

SEQ ID NO: 34785 - protein, 8 aa, synthetic construct
APEKHYEI

SEQ ID NO: 34786 - protein, 9 aa, synthetic construct
RPGGRETPL

SEQ ID NO: 34787 - protein, 9 aa, synthetic construct
APRASTSSS

SEQ ID NO: 34788 - protein, 9 aa, synthetic construct
SPTLQAAEL

SEQ ID NO: 34789 - protein, 9 aa, synthetic construct
IPMPPRPQP

SEQ ID NO: 34790 - protein, 9 aa, synthetic construct
KPSSGSGSL

SEQ ID NO: 34791 - protein, 8 aa, synthetic construct
PSRSFSEL

SEQ ID NO: 34792 - protein, 9 aa, synthetic construct
LPAAPGRSA

SEQ ID NO: 34793 - protein, 9 aa, synthetic construct
SPNGTLVSM

SEQ ID NO: 34794 - protein, 9 aa, synthetic construct
APPGRRREL

SEQ ID NO: 34795 - protein, 9 aa, synthetic construct
LPITARQRV

SEQ ID NO: 34796 - protein, 9 aa, synthetic construct
GPPFPSRSF

SEQ ID NO: 34797 - protein, 9 aa, synthetic construct
PPFPSRSEL

SEQ ID NO: 34798 - protein, 9 aa, synthetic construct
RPQPRGAPQ

SEQ ID NO: 34799 - protein, 9 aa, synthetic construct
LPHAGYAAW

SEQ ID NO: 34800 - protein, 9 aa, synthetic construct
GPDIKGPKL

SEQ ID NO: 34801 - protein, 9 aa, synthetic construct
APGEPQRGF

SEQ ID NO: 34802 - protein, 9 aa, synthetic construct
YPYGLALTV

SEQ ID NO: 34803 - protein, 9 aa, synthetic construct
LPALPPAAV

SEQ ID NO: 34804 - protein, 9 aa, synthetic construct
GPRASTSSS

SEQ ID NO: 34805 - protein, 9 aa, synthetic construct
PPVSSGSSL

SEQ ID NO: 34806 - protein, 9 aa, synthetic construct
APCQSGCSL

SEQ ID NO: 34807 - protein, 8 aa, synthetic construct
PPFPSRSF

SEQ ID NO: 34808 - protein, 9 aa, synthetic construct
QPGGRETPL

SEQ ID NO: 34809 - protein, 9 aa, synthetic construct
TPPPDGSPI

SEQ ID NO: 34810 - protein, 9 aa, synthetic construct
RPMPPSRPQ

SEQ ID NO: 34811 - protein, 9 aa, synthetic construct
NPLDPRAST

SEQ ID NO: 34812 - protein, 9 aa, synthetic construct
NPHPRASTI

SEQ ID NO: 34813 - protein, 9 aa, synthetic construct
KPGEPQRGF

SEQ ID NO: 34814 - protein, 9 aa, synthetic construct
EPKFLKVKL

SEQ ID NO: 34815 - protein, 8 aa, synthetic construct
IPMPPSRP

SEQ ID NO: 34816 - protein, 8 aa, synthetic construct
RARASGVM

SEQ ID NO: 34817 - protein, 9 aa, synthetic construct
HPYGLALTV

SEQ ID NO: 34818 - protein, 9 aa, synthetic construct
APRSLKENL

SEQ ID NO: 34819 - protein, 9 aa, synthetic construct
FPPFPSRSF

SEQ ID NO: 34820 - protein, 9 aa, synthetic construct
MPAVSPGML

SEQ ID NO: 34821 - protein, 9 aa, synthetic construct
GPSGILSFL

SEQ ID NO: 34822 - protein, 9 aa, synthetic construct
MPRPQPRGA

SEQ ID NO: 34823 - protein, 9 aa, synthetic construct
TPLGRPEVV

SEQ ID NO: 34824 - protein, 9 aa, synthetic construct
TPLGLRPEV

SEQ ID NO: 34825 - protein, 9 aa, synthetic construct
LPRASTIFL

SEQ ID NO: 34826 - protein, 9 aa, synthetic construct
MPYGALTVI

SEQ ID NO: 34827 - protein, 9 aa, synthetic construct
NPISGKQIV

SEQ ID NO: 34828 - protein, 9 aa, synthetic construct
IPEKPALEF

SEQ ID NO: 34829 - protein, 9 aa, synthetic construct
RPHQTKGTW

SEQ ID NO: 34830 - protein, 9 aa, synthetic construct
HIRPEKPAL

SEQ ID NO: 34831 - protein, 9 aa, synthetic construct
KPHSLQRRI

SEQ ID NO: 34832 - protein, 9 aa, synthetic construct
SLRPEKPAL

SEQ ID NO: 34833 - protein, 9 aa, synthetic construct
VPGMLPVAL

SEQ ID NO: 34834 - protein, 8 aa, synthetic construct
VPILTHTL

SEQ ID NO: 34835 - protein, 9 aa, synthetic construct
APGRRRELL

SEQ ID NO: 34836 - protein, 8 aa, synthetic construct
RPQPRGAP

SEQ ID NO: 34837 - protein, 9 aa, synthetic construct
HPRSAFYIL

SEQ ID NO: 34838 - protein, 9 aa, synthetic construct
LPEKPALEF

SEQ ID NO: 34839 - protein, 8 aa, synthetic construct
AGRPHQTL

SEQ ID NO: 34840 - protein, 8 aa, synthetic construct
KPKLAHFA

SEQ ID NO: 34841 - protein, 9 aa, synthetic construct
MPKLKGPEV

SEQ ID NO: 34842 - protein, 8 aa, synthetic construct
RPRASTSS

SEQ ID NO: 34843 - protein, 9 aa, synthetic construct
GPSGICLSL

SEQ ID NO: 34844 - protein, 9 aa, synthetic construct
SPMPPSRPQ

SEQ ID NO: 34845 - protein, 8 aa, synthetic construct
NRNRKEML

SEQ ID NO: 34846 - protein, 9 aa, synthetic construct
TAKENIATL

SEQ ID NO: 34847 - protein, 8 aa, synthetic construct
RLVSKGTL

SEQ ID NO: 34848 - protein, 8 aa, synthetic construct
APEKHYEI

SEQ ID NO: 34849 - protein, 9 aa, synthetic construct
QLKLVITAL

SEQ ID NO: 34850 - protein, 8 aa, synthetic construct
VISMRCML

SEQ ID NO: 34851 - protein, 8 aa, synthetic construct
KGHRVHEL

SEQ ID NO: 34852 - protein, 9 aa, synthetic construct
YTMGRLLSL

SEQ ID NO: 34853 - protein, 8 aa, synthetic construct
VNRNRKEM

SEQ ID NO: 34854 - protein, 9 aa, synthetic construct
SRKHRVHEL

SEQ ID NO: 34855 - protein, 8 aa, synthetic construct
TMILQAVL

SEQ ID NO: 34856 - protein, 8 aa, synthetic construct
LRPEKPAL

SEQ ID NO: 34857 - protein, 9 aa, synthetic construct
ELRPRYLEI

SEQ ID NO: 34858 - protein, 8 aa, synthetic construct
YTMGRALL

SEQ ID NO: 34859 - protein, 9 aa, synthetic construct
NMLAKIAVL

SEQ ID NO: 34860 - protein, 8 aa, synthetic construct
YMPYGLAL

SEQ ID NO: 34861 - protein, 9 aa, synthetic construct
HSLQRRIAL

SEQ ID NO: 34862 - protein, 8 aa, synthetic construct
SSRRTISF

SEQ ID NO: 34863 - protein, 9 aa, synthetic construct
IFRDRTQYL

SEQ ID NO: 34864 - protein, 9 aa, synthetic construct
MLAGRHQTL

SEQ ID NO: 34865 - protein, 8 aa, synthetic construct
LCKVKLAF

SEQ ID NO: 34866 - protein, 8 aa, synthetic construct
LGDKLYAL

SEQ ID NO: 34867 - protein, 9 aa, synthetic construct
SLQRRIQQL

SEQ ID NO: 34868 - protein, 9 aa, synthetic construct
WVKTKISSV

SEQ ID NO: 34869 - protein, 9 aa, synthetic construct
APRRRSLKL

SEQ ID NO: 34870 - protein, 8 aa, synthetic construct
DGKSIKTF

SEQ ID NO: 34871 - protein, 8 aa, synthetic construct
ETLRPRYL

SEQ ID NO: 34872 - protein, 8 aa, synthetic construct
TLAEHREL

SEQ ID NO: 34873 - protein, 9 aa, synthetic construct
YLRPRYLEI

SEQ ID NO: 34874 - protein, 9 aa, synthetic construct
DLKKRIESL

SEQ ID NO: 34875 - protein, 9 aa, synthetic construct
HLRPEKPAL

SEQ ID NO: 34876 - protein, 8 aa, synthetic construct
VPILTHTL

SEQ ID NO: 34877 - protein, 8 aa, synthetic construct
FVSKQPTL

SEQ ID NO: 34878 - protein, 8 aa, synthetic construct
WLLPPVTL

SEQ ID NO: 34879 - protein, 8 aa, synthetic construct
HLFRGLRL

SEQ ID NO: 34880 - protein, 8 aa, synthetic construct
AGRPHQTL

SEQ ID NO: 34881 - protein, 8 aa, synthetic construct
AFRKVSTL

SEQ ID NO: 34882 - protein, 8 aa, synthetic construct
FQKKIAKI

SEQ ID NO: 34883 - protein, 8 aa, synthetic construct
MLAAKIAV

SEQ ID NO: 34884 - protein, 8 aa, synthetic construct
RRSLKENL

SEQ ID NO: 34885 - protein, 9 aa, synthetic construct
TRYGAVIKL

SEQ ID NO: 34886 - protein, 9 aa, synthetic construct
SRTGEVLSM

SEQ ID NO: 34887 - protein, 9 aa, synthetic construct
GRVDIPQGM

SEQ ID NO: 34888 - protein, 9 aa, synthetic construct
KRIESLINY

SEQ ID NO: 34889 - protein, 8 aa, synthetic construct
QRRIAQQL

SEQ ID NO: 34890 - protein, 9 aa, synthetic construct
GRSWPPVTL

SEQ ID NO: 34891 - protein, 9 aa, synthetic construct
SRKGHVHEL

SEQ ID NO: 34892 - protein, 9 aa, synthetic construct
SRSDSDQVM

SEQ ID NO: 34893 - protein, 8 aa, synthetic construct
RRTISFRM

SEQ ID NO: 34894 - protein, 9 aa, synthetic construct
KRSSRTISF

SEQ ID NO: 34895 - protein, 9 aa, synthetic construct
IRDRTDIQY

SEQ ID NO: 34896 - protein, 9 aa, synthetic construct
FRDTDIQYL

SEQ ID NO: 34897 - protein, 9 aa, synthetic construct
MRFEAGHVL

SEQ ID NO: 34898 - protein, 9 aa, synthetic construct
RRTDIQYLI

SEQ ID NO: 34899 - protein, 9 aa, synthetic construct
THYPYGLAL

SEQ ID NO: 34900 - protein, 9 aa, synthetic construct
CRNLPDRTF

SEQ ID NO: 34901 - protein, 8 aa, synthetic construct
DRTDIQYL

SEQ ID NO: 34902 - protein, 8 aa, synthetic construct
RRLDGSQL

SEQ ID NO: 34903 - protein, 9 aa, synthetic construct
LRPEPALEF

SEQ ID NO: 34904 - protein, 9 aa, synthetic construct
SRIKLGLKL

SEQ ID NO: 34905 - protein, 9 aa, synthetic construct
FYFLGGTGL

SEQ ID NO: 34906 - protein, 9 aa, synthetic construct
IYTLRPRYL

SEQ ID NO: 34907 - protein, 9 aa, synthetic construct
GQPPFPRSF

SEQ ID NO: 34908 - protein, 9 aa, synthetic construct
FYVTGSEYF

SEQ ID NO: 34909 - protein, 9 aa, synthetic construct
FYVTAGSEY

SEQ ID NO: 34910 - protein, 8 aa, synthetic construct
YMPYGLAL

SEQ ID NO: 34911 - protein, 9 aa, synthetic construct
IFRDRTIQY

SEQ ID NO: 34912 - protein, 9 aa, synthetic construct
LYHEEYISF

SEQ ID NO: 34913 - protein, 9 aa, synthetic construct
KHPGEPQRF

SEQ ID NO: 34914 - protein, 8 aa, synthetic construct
FYTMGRAL

SEQ ID NO: 34915 - protein, 8 aa, synthetic construct
THEEYISF

SEQ ID NO: 34916 - protein, 9 aa, synthetic construct
TYMPYGLAL

SEQ ID NO: 34917 - protein, 8 aa, synthetic construct
LRPEKPAL

SEQ ID NO: 34918 - protein, 9 aa, synthetic construct
FYMAYTLTY

SEQ ID NO: 34919 - protein, 9 aa, synthetic construct
FYSDQEVAL

SEQ ID NO: 34920 - protein, 9 aa, synthetic construct
IVPSSASAY

SEQ ID NO: 34921 - protein, 9 aa, synthetic construct
IILSGSQLA

SEQ ID NO: 34922 - protein, 9 aa, synthetic construct
LKENLVPQI

SEQ ID NO: 34923 - protein, 9 aa, synthetic construct
YLMYSAVSG

SEQ ID NO: 34924 - protein, 9 aa, synthetic construct
VLSMKRMVH

SEQ ID NO: 34925 - protein, 9 aa, synthetic construct
FNPLDHPRA

SEQ ID NO: 34926 - protein, 9 aa, synthetic construct
LAKANKWTS

SEQ ID NO: 34927 - protein, 9 aa, synthetic construct
IANNGGLKA

SEQ ID NO: 34928 - protein, 9 aa, synthetic construct
LQRHHSVEA

SEQ ID NO: 34929 - protein, 9 aa, synthetic construct
FLANVAHAN

SEQ ID NO: 34930 - protein, 9 aa, synthetic construct
LHLNTRYGA

SEQ ID NO: 34931 - protein, 9 aa, synthetic construct
MMSNPPVRA

SEQ ID NO: 34932 - protein, 9 aa, synthetic construct
LVPQINLAS

SEQ ID NO: 34933 - protein, 9 aa, synthetic construct
YWLDPAKTL

SEQ ID NO: 34934 - protein, 9 aa, synthetic construct
FRKVSTLNT

SEQ ID NO: 34935 - protein, 9 aa, synthetic construct
LRLNGDLLA

SEQ ID NO: 34936 - protein, 9 aa, synthetic construct
YEISRDGRL

SEQ ID NO: 34937 - protein, 9 aa, synthetic construct
FVSKQPTLQ

SEQ ID NO: 34938 - protein, 9 aa, synthetic construct
FKESPKQIL

SEQ ID NO: 34939 - protein, 9 aa, synthetic construct
IEMHADNPA

SEQ ID NO: 34940 - protein, 9 aa, synthetic construct
YHMDASGEA

SEQ ID NO: 34941 - protein, 9 aa, synthetic construct
VALLGSYPV

SEQ ID NO: 34942 - protein, 9 aa, synthetic construct
LTGNVNMLA

SEQ ID NO: 34943 - protein, 9 aa, synthetic construct
ISSNAAILG

SEQ ID NO: 34944 - protein, 9 aa, synthetic construct
ITARQRVWR

SEQ ID NO: 34945 - protein, 9 aa, synthetic construct
WQPVSRIPM

SEQ ID NO: 34946 - protein, 9 aa, synthetic construct
LKAAYRAYQ

SEQ ID NO: 34947 - protein, 9 aa, synthetic construct
IESLINRDY

SEQ ID NO: 34948 - protein, 9 aa, synthetic construct
LGENIANNG

SEQ ID NO: 34949 - protein, 9 aa, synthetic construct
IIVNRNRKE

SEQ ID NO: 34950 - protein, 9 aa, synthetic construct
ISSVDRILT

SEQ ID NO: 34951 - protein, 9 aa, synthetic construct
LLPEAKHPG

SEQ ID NO: 34952 - protein, 9 aa, synthetic construct
VLPDGRVTD

SEQ ID NO: 34953 - protein, 9 aa, synthetic construct
WTSHNVTVV

SEQ ID NO: 34954 - protein, 9 aa, synthetic construct
LFHNFPSIV

SEQ ID NO: 34955 - protein, 9 aa, synthetic construct
IQVLPDGRV

SEQ ID NO: 34956 - protein, 9 aa, synthetic construct
FKPKTRTPE

SEQ ID NO: 34957 - protein, 9 aa, synthetic construct
IAKINVGKR

SEQ ID NO: 34958 - protein, 9 aa, synthetic construct
VTVVQRTNT

SEQ ID NO: 34959 - protein, 9 aa, synthetic construct
FSPNGTELL

SEQ ID NO: 34960 - protein, 9 aa, synthetic construct
FAEHQKIHT

SEQ ID NO: 34961 - protein, 9 aa, synthetic construct
LVSKGTLVQ

SEQ ID NO: 34962 - protein, 9 aa, synthetic construct
ISLMDKRLR

SEQ ID NO: 34963 - protein, 9 aa, synthetic construct
IKLGLKRLV

SEQ ID NO: 34964 - protein, 9 aa, synthetic construct
ISRDGRLRS

SEQ ID NO: 34965 - protein, 9 aa, synthetic construct
LKRSSRRTI

SEQ ID NO: 34966 - protein, 9 aa, synthetic construct
IIIVNRNRK

SEQ ID NO: 34967 - protein, 9 aa, synthetic construct
FRMKPKKEN

SEQ ID NO: 34968 - protein, 9 aa, synthetic construct
WKVVKTSVQ

SEQ ID NO: 34969 - protein, 9 aa, synthetic construct
YGAVIKRLS

SEQ ID NO: 34970 - protein, 9 aa, synthetic construct
LLKSRSNGR

SEQ ID NO: 34971 - protein, 9 aa, synthetic construct
FAMAGHENL

SEQ ID NO: 34972 - protein, 9 aa, synthetic construct
VEAAGRPRA

SEQ ID NO: 34973 - protein, 9 aa, synthetic construct
VAHANRVRV

SEQ ID NO: 34974 - protein, 9 aa, synthetic construct
VSPNEKHLF

SEQ ID NO: 34975 - protein, 9 aa, synthetic construct
VEKSTSVTY

SEQ ID NO: 34976 - protein, 9 aa, synthetic construct
FGQVPKQLF

SEQ ID NO: 34977 - protein, 9 aa, synthetic construct
YTLEQALLS

SEQ ID NO: 34978 - protein, 9 aa, synthetic construct
VTSNSGILG

SEQ ID NO: 34979 - protein, 9 aa, synthetic construct
YTPYTKPDA

SEQ ID NO: 34980 - protein, 9 aa, synthetic construct
WMLAGRPHQ

SEQ ID NO: 34981 - protein, 9 aa, synthetic construct
VKYSKSQAI

SEQ ID NO: 34982 - protein, 9 aa, synthetic construct
ISFRMKPKK

SEQ ID NO: 34983 - protein, 9 aa, synthetic construct
LLVFPPAFY

SEQ ID NO: 34984 - protein, 9 aa, synthetic construct
LTIVPSSAS

SEQ ID NO: 34985 - protein, 9 aa, synthetic construct
YSAMRDQYM

SEQ ID NO: 34986 - protein, 9 aa, synthetic construct
LLPHAGYAR

SEQ ID NO: 34987 - protein, 9 aa, synthetic construct
VFMWTAKLE

SEQ ID NO: 34988 - protein, 9 aa, synthetic construct
VISYLSLTC

SEQ ID NO: 34989 - protein, 9 aa, synthetic construct
VLSLSSADA

SEQ ID NO: 34990 - protein, 9 aa, synthetic construct
IKSYDLDPG

SEQ ID NO: 34991 - protein, 9 aa, synthetic construct
VMRFSSEAG

SEQ ID NO: 34992 - protein, 9 aa, synthetic construct
IKTFKESPK

SEQ ID NO: 34993 - protein, 9 aa, synthetic construct
VQWYAPIVP

SEQ ID NO: 34994 - protein, 9 aa, synthetic construct
IKVLLNIIQ

SEQ ID NO: 34995 - protein, 9 aa, synthetic construct
MLQFVGREA

SEQ ID NO: 34996 - protein, 9 aa, synthetic construct
LSGYTPYTK

SEQ ID NO: 34997 - protein, 9 aa, synthetic construct
VNMLAAKIA

SEQ ID NO: 34998 - protein, 9 aa, synthetic construct
FQIYETLRP

SEQ ID NO: 34999 - protein, 9 aa, synthetic construct
VVSITDVDL

SEQ ID NO: 35000 - protein, 9 aa, synthetic construct
FHYFLGGTG

SEQ ID NO: 35001 - protein, 9 aa, synthetic construct
ILGFVSSFG

SEQ ID NO: 35002 - protein, 9 aa, synthetic construct
VSTLNTHKA

SEQ ID NO: 35003 - protein, 9 aa, synthetic construct
LNIIQDLEK

SEQ ID NO: 35004 - protein, 9 aa, synthetic construct
LYALGGYDG

SEQ ID NO: 35005 - protein, 9 aa, synthetic construct
DLIYQNEFL

SEQ ID NO: 35006 - protein, 9 aa, synthetic construct
ISFVLNSGS

SEQ ID NO: 35007 - protein, 9 aa, synthetic construct
IFVAIGFKT

SEQ ID NO: 35008 - protein, 9 aa, synthetic construct
LQMQEGVRS

SEQ ID NO: 35009 - protein, 9 aa, synthetic construct
LVSMGGEQV

SEQ ID NO: 35010 - protein, 9 aa, synthetic construct
TLQFKAQDL

SEQ ID NO: 35011 - protein, 9 aa, synthetic construct
MFFYVTLAG

SEQ ID NO: 35012 - protein, 9 aa, synthetic construct
HEEYISFVL

SEQ ID NO: 35013 - protein, 9 aa, synthetic construct
LTYISSVLQ

SEQ ID NO: 35014 - protein, 9 aa, synthetic construct
IISLMDKRL

SEQ ID NO: 35015 - protein, 9 aa, synthetic construct
VILYEALFG

SEQ ID NO: 35016 - protein, 9 aa, synthetic construct
IQYLIPCAI

SEQ ID NO: 35017 - protein, 9 aa, synthetic construct
IDWVKGTKI

SEQ ID NO: 35018 - protein, 9 aa, synthetic construct
LMIFVAIGF

SEQ ID NO: 35019 - protein, 9 aa, synthetic construct
ILQIISLMD

SEQ ID NO: 35020 - protein, 9 aa, synthetic construct
IHGFSVLES

SEQ ID NO: 35021 - protein, 9 aa, synthetic construct
IELFYTMGR

SEQ ID NO: 35022 - protein, 9 aa, synthetic construct
PQSYQAEII

SEQ ID NO: 35023 - protein, 9 aa, synthetic construct
IAHLIDGIL

SEQ ID NO: 35024 - protein, 9 aa, synthetic construct
LIYQNEFLG

SEQ ID NO: 35025 - protein, 9 aa, synthetic construct
ANKWTSHNV

SEQ ID NO: 35026 - protein, 9 aa, synthetic construct
LNTHKAIHA

SEQ ID NO: 35027 - protein, 9 aa, synthetic construct
WAIIKSYDL

SEQ ID NO: 35028 - protein, 9 aa, synthetic construct
KKIAKINVG

SEQ ID NO: 35029 - protein, 9 aa, synthetic construct
LSGSQLAPE

SEQ ID NO: 35030 - protein, 9 aa, synthetic construct
LHPAAPGAP

SEQ ID NO: 35031 - protein, 9 aa, synthetic construct
QLPGKVKYS

SEQ ID NO: 35032 - protein, 9 aa, synthetic construct
LMYSAVSGS

SEQ ID NO: 35033 - protein, 9 aa, synthetic construct
HQGTKMMPC

SEQ ID NO: 35034 - protein, 9 aa, synthetic construct
TYSSSLKRS

SEQ ID NO: 35035 - protein, 9 aa, synthetic construct
TSASFVSKQ

SEQ ID NO: 35036 - protein, 9 aa, synthetic construct
PTMAIIRAL

SEQ ID NO: 35037 - protein, 9 aa, synthetic construct
LGGTGLHPA

SEQ ID NO: 35038 - protein, 9 aa, synthetic construct
SEASDIWAM

SEQ ID NO: 35039 - protein, 9 aa, synthetic construct
QRHHSVEAA

SEQ ID NO: 35040 - protein, 9 aa, synthetic construct
EVLAALLKS

SEQ ID NO: 35041 - protein, 9 aa, synthetic construct
QWYAPIVPA

SEQ ID NO: 35042 - protein, 9 aa, synthetic construct
NSTATLEPP

SEQ ID NO: 35043 - protein, 9 aa, synthetic construct
IQEIEMHAD

SEQ ID NO: 35044 - protein, 9 aa, synthetic construct
LQAAELIDS

SEQ ID NO: 35045 - protein, 9 aa, synthetic construct
SAGGSPARS

SEQ ID NO: 35046 - protein, 9 aa, synthetic construct
NFPSIVMPN

SEQ ID NO: 35047 - protein, 9 aa, synthetic construct
EEYSAMRDQ

SEQ ID NO: 35048 - protein, 9 aa, synthetic construct
ILGSDVGGG

SEQ ID NO: 35049 - protein, 9 aa, synthetic construct
AAHALSRKG

SEQ ID NO: 35050 - protein, 9 aa, synthetic construct
QAESMMVPG

SEQ ID NO: 35051 - protein, 9 aa, synthetic construct
NEAVFMWTA

SEQ ID NO: 35052 - protein, 9 aa, synthetic construct
LDPAKTLAE

SEQ ID NO: 35053 - protein, 9 aa, synthetic construct
GRGAEASAA

SEQ ID NO: 35054 - protein, 9 aa, synthetic construct
EAGHVLRGS

SEQ ID NO: 35055 - protein, 9 aa, synthetic construct
GNATGVAKQ

SEQ ID NO: 35056 - protein, 9 aa, synthetic construct
SNAAILGRQ

SEQ ID NO: 35057 - protein, 9 aa, synthetic construct
YTLTIVPSS

SEQ ID NO: 35058 - protein, 9 aa, synthetic construct
IVPATQEAN

SEQ ID NO: 35059 - protein, 9 aa, synthetic construct
ALPTITARQ

SEQ ID NO: 35060 - protein, 9 aa, synthetic construct
TGNVNMLAA

SEQ ID NO: 35061 - protein, 9 aa, synthetic construct
PNGTELLVS

SEQ ID NO: 35062 - protein, 9 aa, synthetic construct
HNVTVVQRT

SEQ ID NO: 35063 - protein, 9 aa, synthetic construct
SKGTLVQTK

SEQ ID NO: 35064 - protein, 9 aa, synthetic construct
ILQAVLSLS

SEQ ID NO: 35065 - protein, 9 aa, synthetic construct
VKGTKISSV

SEQ ID NO: 35066 - protein, 9 aa, synthetic construct
NVTVVQRTN

SEQ ID NO: 35067 - protein, 9 aa, synthetic construct
NSGSGLSHD

SEQ ID NO: 35068 - protein, 9 aa, synthetic construct
PRASTIFLS

SEQ ID NO: 35069 - protein, 9 aa, synthetic construct
SEAGHVLRG

SEQ ID NO: 35070 - protein, 9 aa, synthetic construct
SKIIIVNRN

SEQ ID NO: 35071 - protein, 9 aa, synthetic construct
QEGVRSEFA

SEQ ID NO: 35072 - protein, 9 aa, synthetic construct
VVSSSEQPQ

SEQ ID NO: 35073 - protein, 9 aa, synthetic construct
EAAGRPRAS

SEQ ID NO: 35074 - protein, 9 aa, synthetic construct
AGGSGSASS

SEQ ID NO: 35075 - protein, 9 aa, synthetic construct
LHTLIIAEA

SEQ ID NO: 35076 - protein, 9 aa, synthetic construct
TYTLTIVPS

SEQ ID NO: 35077 - protein, 9 aa, synthetic construct
AHANRVRVG

SEQ ID NO: 35078 - protein, 9 aa, synthetic construct
YISSVLQAN

SEQ ID NO: 35079 - protein, 9 aa, synthetic construct
NYMTELRRQ

SEQ ID NO: 35080 - protein, 9 aa, synthetic construct
PSSASAYVS

SEQ ID NO: 35081 - protein, 9 aa, synthetic construct
SYQAEIIEL

SEQ ID NO: 35082 - protein, 9 aa, synthetic construct
SSGSGSLSS

SEQ ID NO: 35083 - protein, 9 aa, synthetic construct
ITSSVEQDS

SEQ ID NO: 35084 - protein, 9 aa, synthetic construct
NIATLCFKA

SEQ ID NO: 35085 - protein, 9 aa, synthetic construct
AEDSRIRLT

SEQ ID NO: 35086 - protein, 9 aa, synthetic construct
VMSAPPVRA

SEQ ID NO: 35087 - protein, 9 aa, synthetic construct
YAPIVPATQ

SEQ ID NO: 35088 - protein, 9 aa, synthetic construct
LQFAIIRER

SEQ ID NO: 35089 - protein, 9 aa, synthetic construct
VSEASDIWA

SEQ ID NO: 35090 - protein, 9 aa, synthetic construct
QNGDPDPGA

SEQ ID NO: 35091 - protein, 9 aa, synthetic construct
FITSSVEQD

SEQ ID NO: 35092 - protein, 9 aa, synthetic construct
DGRVTDIPQ

SEQ ID NO: 35093 - protein, 9 aa, synthetic construct
ATMAYDRYV

SEQ ID NO: 35094 - protein, 9 aa, synthetic construct
HVIARDFGQ

SEQ ID NO: 35095 - protein, 9 aa, synthetic construct
FLGCTDRLV

SEQ ID NO: 35096 - protein, 9 aa, synthetic construct
QGMVTDQFG

SEQ ID NO: 35097 - protein, 9 aa, synthetic construct
TTGITDTPP

SEQ ID NO: 35098 - protein, 9 aa, synthetic construct
LSAIQEIEM

SEQ ID NO: 35099 - protein, 9 aa, synthetic construct
LLDILDTAG

SEQ ID NO: 35100 - protein, 9 aa, synthetic construct
WSPAEDSRI

SEQ ID NO: 35101 - protein, 9 aa, synthetic construct
AEAFDDDTG

SEQ ID NO: 35102 - protein, 9 aa, synthetic construct
LNMEFNPLD

SEQ ID NO: 35103 - protein, 9 aa, synthetic construct
YTPTSASFV

SEQ ID NO: 35104 - protein, 9 aa, synthetic construct
MFAMYDLDE

SEQ ID NO: 35105 - protein, 9 aa, synthetic construct
QVYLFDLTY

SEQ ID NO: 35106 - protein, 9 aa, synthetic construct
SLSSADARQ

SEQ ID NO: 35107 - protein, 9 aa, synthetic construct
HTLIIAEAF

SEQ ID NO: 35108 - protein, 9 aa, synthetic construct
YARAWSPAE

SEQ ID NO: 35109 - protein, 9 aa, synthetic construct
IIKSYDLDP

SEQ ID NO: 35110 - protein, 9 aa, synthetic construct
FTTLADYLH

SEQ ID NO: 35111 - protein, 9 aa, synthetic construct
IAEAFDDDT

SEQ ID NO: 35112 - protein, 9 aa, synthetic construct
NKQVVSSSE

SEQ ID NO: 35113 - protein, 9 aa, synthetic construct
VASSSSESE

SEQ ID NO: 35114 - protein, 9 aa, synthetic construct
NIQGITSGY

SEQ ID NO: 35115 - protein, 9 aa, synthetic construct
STGRRGLQY

SEQ ID NO: 35116 - protein, 9 aa, synthetic construct
TLWPMPTCA

SEQ ID NO: 35117 - protein, 9 aa, synthetic construct
SLWSSSTSA

SEQ ID NO: 35118 - protein, 9 aa, synthetic construct
RLLPSVATA

SEQ ID NO: 35119 - protein, 9 aa, synthetic construct
SLWPMPTAA

SEQ ID NO: 35120 - protein, 9 aa, synthetic construct
FLLKALPSV

SEQ ID NO: 35121 - protein, 9 aa, synthetic construct
LLARLLPSV

SEQ ID NO: 35122 - protein, 8 aa, synthetic construct
SPTSLWPM

SEQ ID NO: 35123 - protein, 9 aa, synthetic construct
APAASPSTT

SEQ ID NO: 35124 - protein, 9 aa, synthetic construct
RLKGSLTSL

SEQ ID NO: 35125 - protein, 8 aa, synthetic construct
PFQSPTSL

SEQ ID NO: 35126 - protein, 8 aa, synthetic construct
MPTRRWSA

SEQ ID NO: 35127 - protein, 8 aa, synthetic construct
RPFQSPTS

SEQ ID NO: 35128 - protein, 9 aa, synthetic construct
LPFQSPTSL

SEQ ID NO: 35129 - protein, 9 aa, synthetic construct
SPMPTCAAA

SEQ ID NO: 35130 - protein, 8 aa, synthetic construct
VPLGNVPV

SEQ ID NO: 35131 - protein, 9 aa, synthetic construct
SPAASPSTT

SEQ ID NO: 35132 - protein, 9 aa, synthetic construct
SPSTSSSAL

SEQ ID NO: 35133 - protein, 9 aa, synthetic construct
WPPPGRAAL

SEQ ID NO: 35134 - protein, 9 aa, synthetic construct
CPPGSRAAL

SEQ ID NO: 35135 - protein, 8 aa, synthetic construct
GPKQQVPL

SEQ ID NO: 35136 - protein, 8 aa, synthetic construct
PPGSRAAL

SEQ ID NO: 35137 - protein, 9 aa, synthetic construct
MPRWSATPA

SEQ ID NO: 35138 - protein, 9 aa, synthetic construct
GPKQPLGNV

SEQ ID NO: 35139 - protein, 9 aa, synthetic construct
VPVSGPGRL

SEQ ID NO: 35140 - protein, 9 aa, synthetic construct
SPFGSARQA

SEQ ID NO: 35141 - protein, 9 aa, synthetic construct
CPGGLHHAL

SEQ ID NO: 35142 - protein, 8 aa, synthetic construct
FLLKARLL

SEQ ID NO: 35143 - protein, 8 aa, synthetic construct
TSFLRRPF

SEQ ID NO: 35144 - protein, 8 aa, synthetic construct
MPTRRWSA

SEQ ID NO: 35145 - protein, 8 aa, synthetic construct
AFLLKARL

SEQ ID NO: 35146 - protein, 8 aa, synthetic construct
QAHFRSYL

SEQ ID NO: 35147 - protein, 9 aa, synthetic construct
LLKARLLSV

SEQ ID NO: 35148 - protein, 8 aa, synthetic construct
ESRRMPNL

SEQ ID NO: 35149 - protein, 8 aa, synthetic construct
EERLKGSL

SEQ ID NO: 35150 - protein, 8 aa, synthetic construct
DNMLRGTV

SEQ ID NO: 35151 - protein, 8 aa, synthetic construct
LGLHRHPL

SEQ ID NO: 35152 - protein, 8 aa, synthetic construct
GPKQQVPL

SEQ ID NO: 35153 - protein, 8 aa, synthetic construct
GLHRHPLL

SEQ ID NO: 35154 - protein, 9 aa, synthetic construct
RRPSPTSLW

SEQ ID NO: 35155 - protein, 9 aa, synthetic construct
ERLKGSLTF

SEQ ID NO: 35156 - protein, 8 aa, synthetic construct
ARWRQAHF

SEQ ID NO: 35157 - protein, 9 aa, synthetic construct
LRFQSPTSL

SEQ ID NO: 35158 - protein, 9 aa, synthetic construct
HYFEESFKF

SEQ ID NO: 35159 - protein, 9 aa, synthetic construct
RRFQSPTSL

SEQ ID NO: 35160 - protein, 8 aa, synthetic construct
LRSQYLAL

SEQ ID NO: 35161 - protein, 8 aa, synthetic construct
RRGLRSQY

SEQ ID NO: 35162 - protein, 9 aa, synthetic construct
GRRGLSQYL

SEQ ID NO: 35163 - protein, 9 aa, synthetic construct
WRQAHFRYL

SEQ ID NO: 35164 - protein, 9 aa, synthetic construct
RRQAHFRSY

SEQ ID NO: 35165 - protein, 9 aa, synthetic construct
ARWRQAHSY

SEQ ID NO: 35166 - protein, 9 aa, synthetic construct
TRRGLRSQY

SEQ ID NO: 35167 - protein, 9 aa, synthetic construct
ARWAHFRSY

SEQ ID NO: 35168 - protein, 8 aa, synthetic construct
YFEESFKF

SEQ ID NO: 35169 - protein, 9 aa, synthetic construct
LTSFLRRPF

SEQ ID NO: 35170 - protein, 9 aa, synthetic construct
IDTEERLKG

SEQ ID NO: 35171 - protein, 9 aa, synthetic construct
IQGITKSGY

SEQ ID NO: 35172 - protein, 9 aa, synthetic construct
LAIDTEERL

SEQ ID NO: 35173 - protein, 9 aa, synthetic construct
VLRDNIQGI

SEQ ID NO: 35174 - protein, 9 aa, synthetic construct
LRDNIQGIT

SEQ ID NO: 35175 - protein, 9 aa, synthetic construct
FTPYSAAFL

SEQ ID NO: 35176 - protein, 9 aa, synthetic construct
VQEHYNYTK

SEQ ID NO: 35177 - protein, 9 aa, synthetic construct
QVPLGNVPV

SEQ ID NO: 35178 - protein, 9 aa, synthetic construct
YSPFGSARW

SEQ ID NO: 35179 - protein, 9 aa, synthetic construct
ASPSTTSRA

SEQ ID NO: 35180 - protein, 9 aa, synthetic construct
NVPVSGQPG

SEQ ID NO: 35181 - protein, 9 aa, synthetic construct
LKGSLTSFL

SEQ ID NO: 35182 - protein, 9 aa, synthetic construct
YSAAFLLKA

SEQ ID NO: 35183 - protein, 9 aa, synthetic construct
NIQGITKSG

SEQ ID NO: 35184 - protein, 9 aa, synthetic construct
TRSLSDFTG

SEQ ID NO: 35185 - protein, 9 aa, synthetic construct
YITVGDKYV

SEQ ID NO: 35186 - protein, 8 aa, synthetic construct
LLSPPVEV

SEQ ID NO: 35187 - protein, 9 aa, synthetic construct
ELLSPPVEV

SEQ ID NO: 35188 - protein, 9 aa, synthetic construct
SLLGTLWYT

SEQ ID NO: 35189 - protein, 9 aa, synthetic construct
TLLSPPVEV

SEQ ID NO: 35190 - protein, 9 aa, synthetic construct
ALLDRVLYL

SEQ ID NO: 35191 - protein, 9 aa, synthetic construct
TLWTGNIEI

SEQ ID NO: 35192 - protein, 9 aa, synthetic construct
RLFRVASKH

SEQ ID NO: 35193 - protein, 9 aa, synthetic construct
SLGKQIKLK

SEQ ID NO: 35194 - protein, 9 aa, synthetic construct
ISRLQNSYK

SEQ ID NO: 35195 - protein, 9 aa, synthetic construct
ALNLGKQIK

SEQ ID NO: 35196 - protein, 9 aa, synthetic construct
SILQNSRYK

SEQ ID NO: 35197 - protein, 9 aa, synthetic construct
LLLSPPVEK

SEQ ID NO: 35198 - protein, 9 aa, synthetic construct
ALLQSRVLY

SEQ ID NO: 35199 - protein, 9 aa, synthetic construct
VLLEGKFKK

SEQ ID NO: 35200 - protein, 9 aa, synthetic construct
VLLNYGKFK

SEQ ID NO: 35201 - protein, 9 aa, synthetic construct
LLNYGKFKK

SEQ ID NO: 35202 - protein, 8 aa, synthetic construct
RLQNSRYK

SEQ ID NO: 35203 - protein, 9 aa, synthetic construct
TLLPPVEVK

SEQ ID NO: 35204 - protein, 9 aa, synthetic construct
RLFRVASKR

SEQ ID NO: 35205 - protein, 9 aa, synthetic construct
RLFRVASSR

SEQ ID NO: 35206 - protein, 8 aa, synthetic construct
RPSSSSPS

SEQ ID NO: 35207 - protein, 9 aa, synthetic construct
SPRSSPSTS

SEQ ID NO: 35208 - protein, 9 aa, synthetic construct
SPRSPSTSS

SEQ ID NO: 35209 - protein, 9 aa, synthetic construct
RVASKGHGL

SEQ ID NO: 35210 - protein, 8 aa, synthetic construct
SPRSSSSS

SEQ ID NO: 35211 - protein, 9 aa, synthetic construct
SASTRHTTL

SEQ ID NO: 35212 - protein, 9 aa, synthetic construct
RPSSPSSSG

SEQ ID NO: 35213 - protein, 9 aa, synthetic construct
RVASKRGGL

SEQ ID NO: 35214 - protein, 9 aa, synthetic construct
RPSSSPSSS

SEQ ID NO: 35215 - protein, 8 aa, synthetic construct
STRHTTPL

SEQ ID NO: 35216 - protein, 9 aa, synthetic construct
RVASGRRGL

SEQ ID NO: 35217 - protein, 9 aa, synthetic construct
SPRSSSPSS

SEQ ID NO: 35218 - protein, 8 aa, synthetic construct
SPRSSSSS

SEQ ID NO: 35219 - protein, 9 aa, synthetic construct
SPASAPNST

SEQ ID NO: 35220 - protein, 9 aa, synthetic construct
IPSETESPA

SEQ ID NO: 35221 - protein, 9 aa, synthetic construct
SPSSSSPSS

SEQ ID NO: 35222 - protein, 8 aa, synthetic construct
SVKTPETL

SEQ ID NO: 35223 - protein, 8 aa, synthetic construct
LSQVHRIL

SEQ ID NO: 35224 - protein, 9 aa, synthetic construct
MAAQSDRVL

SEQ ID NO: 35225 - protein, 8 aa, synthetic construct
AADWGNYF

SEQ ID NO: 35226 - protein, 8 aa, synthetic construct
YFQHYPEL

SEQ ID NO: 35227 - protein, 8 aa, synthetic construct
HRILRERF

SEQ ID NO: 35228 - protein, 8 aa, synthetic construct
SRLQNSRY

SEQ ID NO: 35229 - protein, 9 aa, synthetic construct
FRVASKGHG

SEQ ID NO: 35230 - protein, 9 aa, synthetic construct
FRVASKSRG

SEQ ID NO: 35231 - protein, 9 aa, synthetic construct
FRVASKGRR

SEQ ID NO: 35232 - protein, 9 aa, synthetic construct
LLQSDRVLY

SEQ ID NO: 35233 - protein, 9 aa, synthetic construct
VLASGGLRI

SEQ ID NO: 35234 - protein, 9 aa, synthetic construct
LWYTGNIEI

SEQ ID NO: 35235 - protein, 9 aa, synthetic construct
LQSDRVLYL

SEQ ID NO: 35236 - protein, 9 aa, synthetic construct
ISISRLQNS

SEQ ID NO: 35237 - protein, 9 aa, synthetic construct
YKVLASGGL

SEQ ID NO: 35238 - protein, 9 aa, synthetic construct
ISRLQNSRY

SEQ ID NO: 35239 - protein, 9 aa, synthetic construct
LFRVASKSR

SEQ ID NO: 35240 - protein, 9 aa, synthetic construct
LFRVASKGR

SEQ ID NO: 35241 - protein, 9 aa, synthetic construct
LGNLQGYGM

SEQ ID NO: 35242 - protein, 9 aa, synthetic construct
SRGSEVHTT

SEQ ID NO: 35243 - protein, 9 aa, synthetic construct
HYGQTDRQG

SEQ ID NO: 35244 - protein, 9 aa, synthetic construct
NSRYKVLAS

SEQ ID NO: 35245 - protein, 9 aa, synthetic construct
FHYGQTDRQ

SEQ ID NO: 35246 - protein, 9 aa, synthetic construct
VNGAADWGN

SEQ ID NO: 35247 - protein, 9 aa, synthetic construct
SSSTSSPSS

SEQ ID NO: 35248 - protein, 9 aa, synthetic construct
EVHTTSADA

SEQ ID NO: 35249 - protein, 9 aa, synthetic construct
SVVFESDGS

SEQ ID NO: 35250 - protein, 9 aa, synthetic construct
SSSSTSSPS

SEQ ID NO: 35251 - protein, 9 aa, synthetic construct
SSSSSSRPS

SEQ ID NO: 35252 - protein, 9 aa, synthetic construct
HYGQTDRQG

SEQ ID NO: 35253 - protein, 29 aa, synthetic construct
EANYLLSVSWGYIKCKRMLNRELTHLSEM

SEQ ID NO: 35254 - protein, 29 aa, synthetic construct
QELAIYKQTESDYSNYNLILKKAGQFLDN

SEQ ID NO: 35255 - protein, 29 aa, synthetic construct
ALLGIPKVLYKSKTEKYSFPHTYIRAVHA

SEQ ID NO: 35256 - protein, 29 aa, synthetic construct
DLSQLSEEERRQIATVMSRAQGLPKGSVP

SEQ ID NO: 35257 - protein, 29 aa, synthetic construct
ESDEEQPRFQSAASQAQILDKATEYIQYM

SEQ ID NO: 35258 - protein, 29 aa, synthetic construct
TKREVPKEDGVGDVHHFDSSKIMEEHSYI

SEQ ID NO: 35259 - protein, 29 aa, synthetic construct
YVQGNKRAHGQDLGMAGSCLRRFSTMPFM

SEQ ID NO: 35260 - protein, 29 aa, synthetic construct
LRDSVPSLQGEKASQAQILDKATEYIQYM

SEQ ID NO: 35261 - protein, 27 aa, synthetic construct
MDLEKNYPTPRTTRTGHGGVNQLGGVF

SEQ ID NO: 35262 - protein, 29 aa, synthetic construct
ENSYQCEECGKAFKLFSTLTRHKRIHTGE

SEQ ID NO: 35263 - protein, 29 aa, synthetic construct
GTNRIEVGNLDGSMQKVLVWQNLDSPRAI

SEQ ID NO: 35264 - protein, 29 aa, synthetic construct
PQHPGDHRIRDGDFGVLKREDVFKAVQVQ

SEQ ID NO: 35265 - protein, 29 aa, synthetic construct
QELAIYKQTESDYSFYNLILKKAGQFLDN

SEQ ID NO: 35266 - protein, 29 aa, synthetic construct
YDGDSIYAPLIAVLRGLIVPEIRGNETVP

SEQ ID NO: 35267 - protein, 29 aa, synthetic construct
AKKTGSISFDFRTTKPNGLILFSHGKPRH

SEQ ID NO: 35268 - protein, 29 aa, synthetic construct
LQTRHSVSEMASNKCKRMLNRELTHLSEM

SEQ ID NO: 35269 - protein, 29 aa, synthetic construct
GTGAQPLWGVRSGSRHRQLLSVAATPAAL

SEQ ID NO: 35270 - protein, 29 aa, synthetic construct
PGAEGEYALRLPRITPPLPKPASRTASTG

SEQ ID NO: 35271 - protein, 29 aa, synthetic construct
FIEKSVVGSGSWQRANAQTAVRSPRYAVF

SEQ ID NO: 35272 - protein, 29 aa, synthetic construct
FANDRENYDIIKTYRYLYLAMLERFQDGD

SEQ ID NO: 35273 - protein, 29 aa, synthetic construct
FLVQMRRQHRRGTKAGVSYRPAEVAETGA

SEQ ID NO: 35274 - protein, 29 aa, synthetic construct
DGCVAYAYGLKTADWKGEKRASELAKHPM

SEQ ID NO: 35275 - protein, 29 aa, synthetic construct
GFFKAEEVIIADFCILRIRTKGGNSAILN

SEQ ID NO: 35276 - protein, 29 aa, synthetic construct
NVRSLLVLNSTSFLDYPDPVLEPLSPTGL

SEQ ID NO: 35277 - protein, 29 aa, synthetic construct
RGASLGPPPYLRTESHQHQHQHQHTHQHT

SEQ ID NO: 35278 - protein, 29 aa, synthetic construct
NSVSAVSIEEGAFRNSNYLRLLFLSRNHL

SEQ ID NO: 35279 - protein, 29 aa, synthetic construct
VAGPNGSWKCTVCDTIAQLRIITGEWFFE

SEQ ID NO: 35280 - protein, 29 aa, synthetic construct
TVEEDNDSGGFDALNLDDDSHERYSFGPS

SEQ ID NO: 35281 - protein, 17 aa, synthetic construct
MANVSLHRNPATLKLWN

SEQ ID NO: 35282 - protein, 29 aa, synthetic construct
ALQALKGSQDSSENGLVRSPKSAGSRTSS

SEQ ID NO: 35283 - protein, 29 aa, synthetic construct
PVPPQPQPPPAPAPPPVQSHPPIIAATPQ

SEQ ID NO: 35284 - protein, 29 aa, synthetic construct
ENLPSLAPPPLQTAPAPLTTPPLENLPSL

SEQ ID NO: 35285 - protein, 29 aa, synthetic construct
NKPRPPPLSPLGGPGPSALPNGPPSPRSG

SEQ ID NO: 35286 - protein, 29 aa, synthetic construct
LENLPSLAPPPLQTPSAPLTTPPLENLPS

SEQ ID NO: 35287 - protein, 29 aa, synthetic construct
KGKLGVPGLPGYPGCPGPKGSIGFPGPLG

SEQ ID NO: 35288 - protein, 29 aa, synthetic construct
MMQRPLGSSTAFSIHSLIGSPPQPSPGHF

SEQ ID NO: 35289 - protein, 23 aa, synthetic construct
MAAPIPQGLSCLSRFLGWWFRQP

SEQ ID NO: 35290 - protein, 29 aa, synthetic construct
HANISMDIDTFTSLTPLELQSLDVGNVTA

SEQ ID NO: 35291 - protein, 29 aa, synthetic construct
AVLYQDPHAGPLWVGGSLVLFGSCTFCLN

SEQ ID NO: 35292 - protein, 29 aa, synthetic construct
VTLRGAPSGHPLSAMSFAYAAGAGQLRAA

SEQ ID NO: 35293 - protein, 21 aa, synthetic construct
GQRGPGTHMSEPPHSNMQVYA

SEQ ID NO: 35294 - protein, 29 aa, synthetic construct
VPEALSPAFSEDSEPHGSSSASSPLSAEG

SEQ ID NO: 35295 - protein, 29 aa, synthetic construct
VRHPNYLGDLIMALGWSLPCGFNHILPYF

SEQ ID NO: 35296 - protein, 29 aa, synthetic construct
ENPYTSGIIASKDTTPSIIVASGNIGSEL

SEQ ID NO: 35297 - protein, 29 aa, synthetic construct
ELSLLADEVITVFSFVGMDSDWLMGERGN

SEQ ID NO: 35298 - protein, 29 aa, synthetic construct
IPRFMLLESGGLQIVPVFIQDAGNYTCYA

SEQ ID NO: 35299 - protein, 29 aa, synthetic construct
QKGASSTWMKAIVSLGTLGDRMAAMILLI

SEQ ID NO: 35300 - protein, 29 aa, synthetic construct
PGTEPTGTSEPLGTDTVSAELSSPWAARD

SEQ ID NO: 35301 - protein, 26 aa, synthetic construct
KLTLTCKHQLVRDSYKASCNCSNSIY

SEQ ID NO: 35302 - protein, 29 aa, synthetic construct
PTPCQLQSEQAFLRMVQALLSNSSMLPTL

SEQ ID NO: 35303 - protein, 29 aa, synthetic construct
DDFPAPSDGYYRGERTQDEEEGGASSDAT

SEQ ID NO: 35304 - protein, 29 aa, synthetic construct
HIHHRQKRSVSIERCVETLVVADKMMVGY

SEQ ID NO: 35305 - protein, 29 aa, synthetic construct
QQEEEAQLEEIEETEGEGLQEEGVQLEEV

SEQ ID NO: 35306 - protein, 29 aa, synthetic construct
TTRFGSGAAGGSGSASSNSSGDALVTRIS

SEQ ID NO: 35307 - protein, 29 aa, synthetic construct
TTRFGSGAAGGSGSCSSNSSGDALVTRIS

SEQ ID NO: 35308 - protein, 20 aa, synthetic construct
VEDIWIPREDKNNFFDRHCF

SEQ ID NO: 35309 - protein, 29 aa, synthetic construct
VSMPLVEERHRILNKTGKILLEKFGGSFL

SEQ ID NO: 35310 - protein, 29 aa, synthetic construct
KDQASFLSDSNMFISLPRVKELLEDDKEK

SEQ ID NO: 35311 - protein, 29 aa, synthetic construct
LGPQQIKDLLLAALQGLKGSSEAPGKDSR

SEQ ID NO: 35312 - protein, 27 aa, synthetic construct
MPLVEERHRILNKTGKILLEKFGGSFL

SEQ ID NO: 35313 - protein, 29 aa, synthetic construct
NSSREKIVIPVFNLLVKDIYFLHKIHTNH

SEQ ID NO: 35314 - protein, 29 aa, synthetic construct
TSDSPALVGSNITFVVNLIFPRCQKEDAN

SEQ ID NO: 35315 - protein, 29 aa, synthetic construct
QVEVLVEYPLRCLVSVAQVVAEMWRRNGL

SEQ ID NO: 35316 - protein, 29 aa, synthetic construct
GSGPFSEIVLSAPEWLPTTPAAPGLPPTE

SEQ ID NO: 35317 - protein, 29 aa, synthetic construct
SLPAFGPDTQSELPPSFAVITEDATLSPE

SEQ ID NO: 35318 - protein, 29 aa, synthetic construct
LALLFNMLRHLEQPHQQLSPEIKGGVSLC

SEQ ID NO: 35319 - protein, 29 aa, synthetic construct
YMLAMGQDVDLHTIQFHAESFLYRNGENY

SEQ ID NO: 35320 - protein, 29 aa, synthetic construct
ALYVRDTLQPGMRVWMLDDYEEISAGDEG

SEQ ID NO: 35321 - protein, 29 aa, synthetic construct
TDVRQVFEYDLISQYMQGYPSKVHILPRP

SEQ ID NO: 35322 - protein, 29 aa, synthetic construct
LIALRIEKNELSRIMPGAFRNLGSLRYLS

SEQ ID NO: 35323 - protein, 29 aa, synthetic construct
GICGREYGLGDRWFQRVEDRQDLNRQRIQ

SEQ ID NO: 35324 - protein, 29 aa, synthetic construct
KRKTGRQVNCQMRVMKTMPFFLEGKPKAT

SEQ ID NO: 35325 - protein, 29 aa, synthetic construct
HFLGMRVQSELEHLTELRREAGKDRSSVH

SEQ ID NO: 35326 - protein, 29 aa, synthetic construct
AAMYRGPVYALHDVTDKIPMTNSPILDPL

SEQ ID NO: 35327 - protein, 29 aa, synthetic construct
SAKPFTIDVDKKLEDGQKNIRLLRTELQK

SEQ ID NO: 35328 - protein, 29 aa, synthetic construct
PIRRKRSIEEAVPALCKTRTVIYEIPRSQ

SEQ ID NO: 35329 - protein, 29 aa, synthetic construct
PVLDSDGSFFLYSKFTVDKSRWQQGNVFS

SEQ ID NO: 35330 - protein, 29 aa, synthetic construct
ESSRSPDPTPPALDEETSSLLRCTSPWCL

SEQ ID NO: 35331 - protein, 29 aa, synthetic construct
QKDSIKLDDDSERKLVKMILKLLEDKNGE

SEQ ID NO: 35332 - protein, 29 aa, synthetic construct
DSGGSKTFSAKDYMSRTPHWALFGASERG

SEQ ID NO: 35333 - protein, 29 aa, synthetic construct
PRGLASGRLPLAVHCAQHGPGSGAPWLRI

SEQ ID NO: 35334 - protein, 29 aa, synthetic construct
SAETNELREALLKIVPDSEQRLKIDQILV

SEQ ID NO: 35335 - protein, 29 aa, synthetic construct
YLGSCLLLLGGFSLVLSFAPWCDERCRRR

SEQ ID NO: 35336 - protein, 29 aa, synthetic construct
TGAVKLAKGTVQTGVDTTKTVLTGTKDAV

SEQ ID NO: 35337 - protein, 29 aa, synthetic construct
LTGAVKLAKGTVQTSMDTTKTVLTGTKDA

SEQ ID NO: 35338 - protein, 29 aa, synthetic construct
YFTLAMENIKSSRGVMGNIIIELYEVAGI

SEQ ID NO: 35339 - protein, 29 aa, synthetic construct
KPEKTKAVENYLIQIARYGQLSEKVSLDS

SEQ ID NO: 35340 - protein, 29 aa, synthetic construct
FSELFGPHQQGLPPHYPLSQLPPGPSLGG

SEQ ID NO: 35341 - protein, 29 aa, synthetic construct
RAHAEERLLKKLFSAYNKWSRPVANISDV

SEQ ID NO: 35342 - protein, 29 aa, synthetic construct
AEFQWFKEETRLATDLDGMRIENKGRMST

SEQ ID NO: 35343 - protein, 29 aa, synthetic construct
QGSFGMVYEGNARDLIKGEAETRVAVKTV

SEQ ID NO: 35344 - protein, 29 aa, synthetic construct
WILRLPPGSNGEVPNVPVTFDDVAVHFSE

SEQ ID NO: 35345 - protein, 29 aa, synthetic construct
TCFVFSDVDLIPMNEHNAYRCFSQPRHIS

SEQ ID NO: 35346 - protein, 29 aa, synthetic construct
PSLLSKRKKVKMKRGKASSSGKRQSSRTV

SEQ ID NO: 35347 - protein, 29 aa, synthetic construct
LERNKFYSFALDKTVTPDTKALLERAKSL

SEQ ID NO: 35348 - protein, 25 aa, synthetic construct
ARSQTHTQRGMGLGVTSSMRGMDAV

SEQ ID NO: 35349 - protein, 29 aa, synthetic construct
KTFNWSSTLTNHRKSYTEEKPYKCEEYNK

SEQ ID NO: 35350 - protein, 29 aa, synthetic construct
VEPMKKVKSRKLTLLHSKSCDSLAVSQAC

SEQ ID NO: 35351 - protein, 29 aa, synthetic construct
SLGKLVSCGCGWKGNGKLPGTSRHECEST

SEQ ID NO: 35352 - protein, 29 aa, synthetic construct
SRNIYSADYYKANEHDAIPIRWMPPESIF

SEQ ID NO: 35353 - protein, 29 aa, synthetic construct
AASCMCPSKCQSAAASQLDKPRLNRAPKR

SEQ ID NO: 35354 - protein, 21 aa, synthetic construct
LDDVNEIIRKEFSGTPARNQT

SEQ ID NO: 35355 - protein, 29 aa, synthetic construct
LVMPPSTQAVSFQPDTDNRANFSSDRAFH

SEQ ID NO: 35356 - protein, 29 aa, synthetic construct
VLEREYFKGEFPPYLKPGEISNDPITFNT

SEQ ID NO: 35357 - protein, 29 aa, synthetic construct
IMSKNAYVPMAVGSRFAGIVNSAVQTTFV

SEQ ID NO: 35358 - protein, 29 aa, synthetic construct
KPEKTKAVENYLIQIARYGQLSEKVSEQG

SEQ ID NO: 35359 - protein, 29 aa, synthetic construct
LNGRLPDLINDALHQSGQIERGCEGPSTT

SEQ ID NO: 35360 - protein, 29 aa, synthetic construct
SKGNNVFVVHKPSAMPSREGSESGPGPSS

SEQ ID NO: 35361 - protein, 29 aa, synthetic construct
SYEPSHDGDLGFEKVEQLRILEQSGEWWK

SEQ ID NO: 35362 - protein, 29 aa, synthetic construct
CKECGKAFSNSSHLMGHGRIHSGEKPYVC

SEQ ID NO: 35363 - protein, 29 aa, synthetic construct
RLAHYNKRSTITSRDIQTAVRLLLPGELA

SEQ ID NO: 35364 - protein, 29 aa, synthetic construct
QTRGLQTGPVPPGRRAGPPAVATSAAAAA

SEQ ID NO: 35365 - protein, 29 aa, synthetic construct
DVQTWQESKMACAAKNASLLKINNKNALE

SEQ ID NO: 35366 - protein, 29 aa, synthetic construct
AALVTSNSTHPKGKFYNFNKFGENKYDKS

SEQ ID NO: 35367 - protein, 29 aa, synthetic construct
PQRPVHGLGVPLHSTTPLPRRPQPRQDLG

SEQ ID NO: 35368 - protein, 29 aa, synthetic construct
TKRPAPARPTMPPPPVSGSRSSPPAPPLP

SEQ ID NO: 35369 - protein, 29 aa, synthetic construct
MFILLRPEDNIRLALRLESTYQNRTRYMV

SEQ ID NO: 35370 - protein, 29 aa, synthetic construct
PQRPVHGLGVPLHSTTPLPRRPQPRQFFN

SEQ ID NO: 35371 - protein, 29 aa, synthetic construct
QEVLLTVQKDCQCECLFHGNYSRATEICV

SEQ ID NO: 35372 - protein, 29 aa, synthetic construct
AAGEGEARPSTPQRKASNASKSNIAAANS

SEQ ID NO: 35373 - protein, 29 aa, synthetic construct
FLKGGGGGGGGGGGRGAFEAAGFHLNEHL

SEQ ID NO: 35374 - protein, 29 aa, synthetic construct
QVMQAKKKELARRDNIEDGDSMISSATSD

SEQ ID NO: 35375 - protein, 29 aa, synthetic construct
SVFSSCQRDCLTCQVKLHPALDSFDLEVC

SEQ ID NO: 35376 - protein, 29 aa, synthetic construct
SSLKLVKENNIRSVVFPCISTGIYGFPNE

SEQ ID NO: 35377 - protein, 29 aa, synthetic construct
SGTRHTESSSRGQAVSSHEQARSSAGERH

SEQ ID NO: 35378 - protein, 29 aa, synthetic construct
FLKGGGGGGGGGGGRGGGLGNVLGGLISG

SEQ ID NO: 35379 - protein, 29 aa, synthetic construct
QVIAVHIDNGFMRKQESQSVEEALKKLGI

SEQ ID NO: 35380 - protein, 29 aa, synthetic construct
TGGHEERKTKRPSLQLFGDHDYCQSINSK

SEQ ID NO: 35381 - protein, 29 aa, synthetic construct
EAALNWAEVECQRQELALSIENKRKVLGK

SEQ ID NO: 35382 - protein, 29 aa, synthetic construct
VNTHRPREYWDYESDVVEWGNQDDYQLVR

SEQ ID NO: 35383 - protein, 29 aa, synthetic construct
PTAEFQDRISGASEEDIVHSGLAYTMERS

SEQ ID NO: 35384 - protein, 29 aa, synthetic construct
GSALCTSSIVIKEPNKPPVFDQHLTPVTV

SEQ ID NO: 35385 - protein, 29 aa, synthetic construct
QLELPEQQEGQLELSQQQEGQLELSEQQE

SEQ ID NO: 35386 - protein, 29 aa, synthetic construct
HTSKLIQEDILDTGYDKNGKEEVIKRKIP

SEQ ID NO: 35387 - protein, 29 aa, synthetic construct
FYVQVSGTEYEVAQSPAKALEGQGACGAG

SEQ ID NO: 35388 - protein, 29 aa, synthetic construct
VSPSRRWWYRCYAYNSNSPYEWSLPSDLL

SEQ ID NO: 35389 - protein, 29 aa, synthetic construct
QDCERAICIDPAYSEAYGRMGLALSSLNK

SEQ ID NO: 35390 - protein, 17 aa, synthetic construct
MNEHNAYRCFSQPRHIS

SEQ ID NO: 35391 - protein, 29 aa, synthetic construct
THATDKYSDYHPCTGTFSYQSTFSVHQKV

SEQ ID NO: 35392 - protein, 29 aa, synthetic construct
SIPTPPVTTPEGDDKPESPEYSGGNIVRV

SEQ ID NO: 35393 - protein, 29 aa, synthetic construct
SKLQEIYQELTQLKSAVGELPEKSKLQEI

SEQ ID NO: 35394 - protein, 29 aa, synthetic construct
TIVRKKALPDSGEDGDTKEALKEFDFLVT

SEQ ID NO: 35395 - protein, 29 aa, synthetic construct
MEESVAHAVAAVGSHLYISGGFGGVALGR

SEQ ID NO: 35396 - protein, 29 aa, synthetic construct
FLISLTQKIPTAHKHSHVSMLQEDLLRLP

SEQ ID NO: 35397 - protein, 29 aa, synthetic construct
ETFGSLEETSPPPCCNSVTDSLLLVHERY

SEQ ID NO: 35398 - protein, 29 aa, synthetic construct
KKAQWGSSGAASEPEVLGEEGCGFPSTNE

SEQ ID NO: 35399 - protein, 29 aa, synthetic construct
IRRLLETSNARAVIMFANEDDIRRVLEAA

SEQ ID NO: 35400 - protein, 23 aa, synthetic construct
MSERQGAGVTNGKDKTSGENDGQ

SEQ ID NO: 35401 - protein, 29 aa, synthetic construct
RGGFAGVQGTFCMADWGFCFAVSALVVAC

SEQ ID NO: 35402 - protein, 29 aa, synthetic construct
KNKDRQLIGRVEASNADAGIDGVILYSLG

SEQ ID NO: 35403 - protein, 29 aa, synthetic construct
QHWELIQEDILDTGYDKNGKEEVIKRKIP

SEQ ID NO: 35404 - protein, 29 aa, synthetic construct
IKLNELWKNFGFKKHSEKLPPCKKPLSPV

SEQ ID NO: 35405 - protein, 29 aa, synthetic construct
PVTSPSSASSGHTTSLPVTDASSVPTGHA

SEQ ID NO: 35406 - protein, 29 aa, synthetic construct
SVAELRPDSPAHVLAALLHETRAGPTAVY

SEQ ID NO: 35407 - protein, 27 aa, synthetic construct
TAAFAAGKDSGLDWTGASRASEFLPRS

SEQ ID NO: 35408 - protein, 23 aa, synthetic construct
RSPYYKYEEKRKKKMKETTTGPG

SEQ ID NO: 35409 - protein, 29 aa, synthetic construct
TDEYDPTLICSPTHAGLGSQPYYPQHPMV

SEQ ID NO: 35410 - protein, 29 aa, synthetic construct
SSGASGLNDDYVFVMPVEVDSAGSYISHD

SEQ ID NO: 35411 - protein, 29 aa, synthetic construct
RCDHCRVLFLDYVMLTIHMGCHGFRDPFE

SEQ ID NO: 35412 - protein, 29 aa, synthetic construct
VVDAKTIFTGHTAVAEDVSWHLLHESLFG

SEQ ID NO: 35413 - protein, 29 aa, synthetic construct
GEAAASPEAEQFPETSELEDDDAEGLSSR

SEQ ID NO: 35414 - protein, 29 aa, synthetic construct
GYILVYSAKRKASMRMLRAFLSEVQDTIP

SEQ ID NO: 35415 - protein, 29 aa, synthetic construct
MSFVSTNNLMLVTFQSPHIRRLSGIRAYF

SEQ ID NO: 35416 - protein, 29 aa, synthetic construct
GNDLFREKDYKQALGQYMEGLNVADYAAS

SEQ ID NO: 35417 - protein, 29 aa, synthetic construct
KRTVPDNQCFIQFLFNPAVTFGTAIAAFY

SEQ ID NO: 35418 - protein, 29 aa, synthetic construct
HGYVDVTIDIRSIGIPWTLHTWLESLRIA

SEQ ID NO: 35419 - protein, 29 aa, synthetic construct
SDEGLWDMFVKDIPWSATSYTLSLDKLRQ

SEQ ID NO: 35420 - protein, 29 aa, synthetic construct
NYSETPLQLAAAVGIPWTLHTWLESLRIA

SEQ ID NO: 35421 - protein, 29 aa, synthetic construct
YLCKSEEFMDPATFTNMYNRPIHITLDSE

SEQ ID NO: 35422 - protein, 29 aa, synthetic construct
HPVQCQENSDEAKALQTPSALLGQKSNTD

SEQ ID NO: 35423 - protein, 29 aa, synthetic construct
FGVKIAVVTKRERSMVPYIVRQCVEEIER

SEQ ID NO: 35424 - protein, 29 aa, synthetic construct
DRKLALCWARALPSWPGASRSGGLEESRD

SEQ ID NO: 35425 - protein, 29 aa, synthetic construct
AKSNSCRALATGMRKKHKISGMILSFFKL

SEQ ID NO: 35426 - protein, 29 aa, synthetic construct
KAKSNSCRALATGMKRKHKISGMILSFFK

SEQ ID NO: 35427 - protein, 29 aa, synthetic construct
TVPGSTMKMGSLERTKLRYSDLDFEVMHT

SEQ ID NO: 35428 - protein, 29 aa, synthetic construct
TVPGSTMKMGSLERTKLRYSDLDFEKVMH

SEQ ID NO: 35429 - protein, 29 aa, synthetic construct
RAQLLGLIQRVVREKKEGCYTNRMYQRAE

SEQ ID NO: 35430 - protein, 29 aa, synthetic construct
KIAVVTKRERSKVPCIVRQCVEEIERRGM

SEQ ID NO: 35431 - protein, 22 aa, synthetic construct
MSGRGKQDGKARAKAKTRSSRA

SEQ ID NO: 35432 - protein, 29 aa, synthetic construct
YKCEECGKAFKCSSTLTTHKRIHTADKPY

SEQ ID NO: 35433 - protein, 29 aa, synthetic construct
ESPCESGCGDMDEDSSCPQLPPRDSPRCL

SEQ ID NO: 35434 - protein, 29 aa, synthetic construct
GFPGPKGTMGHGLPSQKGEHGERGDVGKK

SEQ ID NO: 35435 - protein, 29 aa, synthetic construct
VNLYVQIHLLQFHGAKYAAIDPSMVSAEE

SEQ ID NO: 35436 - protein, 29 aa, synthetic construct
MRPIKTEPGLSSHYRHSSSVSQTFSVSAM

SEQ ID NO: 35437 - protein, 29 aa, synthetic construct
KKPEDSSAPRCLGKGKGRTHPRIDPDVIH

SEQ ID NO: 35438 - protein, 29 aa, synthetic construct
RAGPGTGAQPLWGVQSGSGHRQLLSVAAT

SEQ ID NO: 35439 - protein, 29 aa, synthetic construct
AGPGTGAQPLWGVRGGSGHRQLLSVAATP

SEQ ID NO: 35440 - protein, 29 aa, synthetic construct
SGRAVNDGSWHSVFPELNRNFTSLSLDDS

SEQ ID NO: 35441 - protein, 29 aa, synthetic construct
LVTVMKVEKAPQETSADIGGLDNQIQEIK

SEQ ID NO: 35442 - protein, 29 aa, synthetic construct
SQETDSCTPITSEVLDTMVCQSSSTVGQS

SEQ ID NO: 35443 - protein, 29 aa, synthetic construct
RCQAWQDWPLTQVTVYRDGSALGPPGPNR

SEQ ID NO: 35444 - protein, 29 aa, synthetic construct
HGPAARGDTGDTGANPPPPAGPSLARPDA

SEQ ID NO: 35445 - protein, 29 aa, synthetic construct
AHPGAGGDRTRPRRCRSTESWIERCLNES

SEQ ID NO: 35446 - protein, 29 aa, synthetic construct
KSSLKFSPGPCPGPSPGPSPGPGPGPSPG

SEQ ID NO: 35447 - protein, 29 aa, synthetic construct
KVVLEAMARDPPNRGPPTTEGTRGLLSCL

SEQ ID NO: 35448 - protein, 11 aa, synthetic construct
DHPRPRDTTGD

SEQ ID NO: 35449 - protein, 29 aa, synthetic construct
EVNSGCTGKTLLVRSYITTEDVCQICAEK

SEQ ID NO: 35450 - protein, 29 aa, synthetic construct
CGYACCLQCLNSLQREPDGEGLLCRFCSV

SEQ ID NO: 35451 - protein, 29 aa, synthetic construct
LLIQVERSEDPPKRMYFNKQENCILLRLD

SEQ ID NO: 35452 - protein, 29 aa, synthetic construct
FDRTLYNGHSGYNPVTGIFTCPVGGVYYF

SEQ ID NO: 35453 - protein, 29 aa, synthetic construct
EIRILAVITIQAGVCGYLARRRIRLWHRG

SEQ ID NO: 35454 - protein, 29 aa, synthetic construct
GSRYPELVLKAPLDGEEQPHHHLVLTAVD

SEQ ID NO: 35455 - protein, 29 aa, synthetic construct
IGNSCGTKGHEAAKFMAAHITANTNPFSW

SEQ ID NO: 35456 - protein, 29 aa, synthetic construct
SRLSGTLSFTSAEDHEDDEDEDDEEAGPD

SEQ ID NO: 35457 - protein, 29 aa, synthetic construct
QLPLGDGTSGEDAELSPPPDGQWGSQLLA

SEQ ID NO: 35458 - protein, 29 aa, synthetic construct
TAGTERPCGDGRSQQSPEGGGGAGARGGA

SEQ ID NO: 35459 - protein, 26 aa, synthetic construct
KDKLDLSECVDKIKGQAIFASHRKMP

SEQ ID NO: 35460 - protein, 29 aa, synthetic construct
MSLPPPGSEEEEEEDETTSLLPAIAAPPP

SEQ ID NO: 35461 - protein, 29 aa, synthetic construct
LSYMEDHLKNKNRLKKEWEALCAYQAEPN

SEQ ID NO: 35462 - protein, 29 aa, synthetic construct
SREGKFQNPYAHSLISALHYLVPVRPRRQ

SEQ ID NO: 35463 - protein, 29 aa, synthetic construct
LALSGDTRPRFLWQSKRECHFFNGTERVR

SEQ ID NO: 35464 - protein, 29 aa, synthetic construct
VAIMCLPFTFVYTLLDHWVFGEAMCKLNP

SEQ ID NO: 35465 - protein, 29 aa, synthetic construct
AVGVIDILPNCVSSLYLYYDPDYSFLSLG

SEQ ID NO: 35466 - protein, 29 aa, synthetic construct
KFQLSGQKLFIPQINTKHSGLYACSVRNS

SEQ ID NO: 35467 - protein, 29 aa, synthetic construct
VLTIKNNNLSKDHYTLIVKVSDGKFYSTS

SEQ ID NO: 35468 - protein, 29 aa, synthetic construct
ALSGDTRPRFLWQPTRECHFFNGTERVRF

SEQ ID NO: 35469 - protein, 29 aa, synthetic construct
PLALSGDTRPRFLWHPKRECHFFNGTERV

SEQ ID NO: 35470 - protein, 29 aa, synthetic construct
VHVPPNIAGTDEPRVITVLRNRQVTLECK

SEQ ID NO: 35471 - protein, 24 aa, synthetic construct
VEALRFVKRHCKRCIIEHTNPAFF

SEQ ID NO: 35472 - protein, 29 aa, synthetic construct
LNIYLDELIKNTQTSTFTISQSVLVTNLK

SEQ ID NO: 35473 - protein, 29 aa, synthetic construct
CLLGPTLKKRYPTVQEIEVIGGYLALQKS

SEQ ID NO: 35474 - protein, 29 aa, synthetic construct
RESLCSIRRASSVHNIEGFGVHPKNIFRD

SEQ ID NO: 35475 - protein, 29 aa, synthetic construct
HLQRLRSYSAGEASDVSRNRGASLLARPG

SEQ ID NO: 35476 - protein, 29 aa, synthetic construct
AMDNDIVQGAEDQGTQGEEGAYERDNQHQ

SEQ ID NO: 35477 - protein, 29 aa, synthetic construct
THLDWSKDGNFIMSSSGDYEILYWDVAGG

SEQ ID NO: 35478 - protein, 29 aa, synthetic construct
TFRKFDAPFTLTWFSTNWNFLFFPLYYVG

SEQ ID NO: 35479 - protein, 29 aa, synthetic construct
VGAALFKGIKSSGKEVYFTALFPYVVLLI

SEQ ID NO: 35480 - protein, 29 aa, synthetic construct
LVSSPQPPPPIGMASRGPAYGLSREVQQK

SEQ ID NO: 35481 - protein, 29 aa, synthetic construct
MVNKLAEGAERDGKSNVAFMSYFLQGKVD

SEQ ID NO: 35482 - protein, 29 aa, synthetic construct
CTCSRASQVECTGAHIVAVPTPLPWNAMS

SEQ ID NO: 35483 - protein, 17 aa, synthetic construct
MASRGPAYGLSREVQQK

SEQ ID NO: 35484 - protein, 29 aa, synthetic construct
GKAFILSSTLSKHKGIHTGEKPYKCEECG

SEQ ID NO: 35485 - protein, 29 aa, synthetic construct
YECKQCGKAFRSASGLQKHIRTHTGEKPY

SEQ ID NO: 35486 - protein, 29 aa, synthetic construct
TRGLHQQDCVHEAEKGSKLKILGPFSNFF

SEQ ID NO: 35487 - protein, 29 aa, synthetic construct
PNTSVEQGSGLLSTSVGEKSVTQRWERGE

SEQ ID NO: 35488 - protein, 29 aa, synthetic construct
MYNSLMKISERYGPMFTIHLGPRRVVVLC

SEQ ID NO: 35489 - protein, 29 aa, synthetic construct
RAHLLLAQLEHSEPTEAEPEALSPVPALK

SEQ ID NO: 35490 - protein, 29 aa, synthetic construct
NGNFNNSYSLHKGDCNDSVQVVDCGLSLN

SEQ ID NO: 35491 - protein, 29 aa, synthetic construct
ESVLWQLFGPFGAVSNVKVIRDFTTNKCK

SEQ ID NO: 35492 - protein, 29 aa, synthetic construct
CGNFDGIQNNDLTSRNLQVEEDPVDFGNS

SEQ ID NO: 35493 - protein, 29 aa, synthetic construct
GSGAWVRGRHLVLLVTAQAAAAGHRLLAE

SEQ ID NO: 35494 - protein, 29 aa, synthetic construct
RDFHFSMDSLLAEGGGLGGGDVPGLTDEE

SEQ ID NO: 35495 - protein, 34 aa, synthetic construct
YYGPQEGDKKGQSPFCTAANHTTFSWATAMAPTG

SEQ ID NO: 35496 - protein, 29 aa, synthetic construct
SCNCLLLKVNQIGSESLQACKLAQANGWG

SEQ ID NO: 35497 - protein, 30 aa, synthetic construct
RRGMEEVGIYRVSGRCGHGHPGTEGSLRRQ

SEQ ID NO: 35498 - protein, 16 aa, synthetic construct
ADRLRDPDSHIVKKNK

SEQ ID NO: 35499 - protein, 29 aa, synthetic construct
ALQDVNTNINEYKMHKEVASKYTKVEQLT

SEQ ID NO: 35500 - protein, 29 aa, synthetic construct
LRLDSTGVILSPGYLDSYPNLQMCAWSIS

SEQ ID NO: 35501 - protein, 29 aa, synthetic construct
GGFDPQGALRNMAVVKHNLNIMIKRYNST

SEQ ID NO: 35502 - protein, 29 aa, synthetic construct
KGIIHLVTESQSLNKKRDATTKEQSKPLI

SEQ ID NO: 35503 - protein, 29 aa, synthetic construct
ALTSGDETSLGRAQCQRKGILKNRLQYPL

SEQ ID NO: 35504 - protein, 29 aa, synthetic construct
KDLYANNVLSGGTTTYPGIADRMQKEITA

SEQ ID NO: 35505 - protein, 29 aa, synthetic construct
GVVLYIMLSGYPPFMGHCGADCGWDRGEV

SEQ ID NO: 35506 - protein, 29 aa, synthetic construct
KVCPAKFTQFVHLKRHKRLHTRERPHKCS

SEQ ID NO: 35507 - protein, 29 aa, synthetic construct
QFQMYRWAFIPEASYDSGLEVRRQGIHQR

SEQ ID NO: 35508 - protein, 29 aa, synthetic construct
TGQLNRFVQLSGRPQLPGKKKIRWDPVRR

SEQ ID NO: 35509 - protein, 29 aa, synthetic construct
FEAQERATEAENVPSVIPTPHHYLLSVYR

SEQ ID NO: 35510 - protein, 29 aa, synthetic construct
HRVVDTFQDYFGVCLEPVIKDNVVVVYEV

SEQ ID NO: 35511 - protein, 29 aa, synthetic construct
RFSATVSVADTAQRIVSKYRCVIRSDGGS

SEQ ID NO: 35512 - protein, 29 aa, synthetic construct
EKKQIYAIKYVNLEKADNQTLDSYRNEIA

SEQ ID NO: 35513 - protein, 29 aa, synthetic construct
SKFGGFDPQGALRNIAVAKHNLNIMIKRY

SEQ ID NO: 35514 - protein, 29 aa, synthetic construct
GAPRGSSLAPLLLHPPRVTPPRSPSPPRS

SEQ ID NO: 35515 - protein, 29 aa, synthetic construct
EQDRILWVQAMYRAMGQSHKPVPPTQVQK

SEQ ID NO: 35516 - protein, 29 aa, synthetic construct
GGFDPQGALRNMAVPKHNLNIMIKRYNST

SEQ ID NO: 35517 - protein, 29 aa, synthetic construct
TAILATLPEFVVYKSQMEDQKYKCAFSRT

SEQ ID NO: 35518 - protein, 29 aa, synthetic construct
LGSEQFAETPKENHNNYRTLLEKEKEWAL

SEQ ID NO: 35519 - protein, 29 aa, synthetic construct
EFSKFGGFDPQGALTNMAVAKHNLNIMIK

SEQ ID NO: 35520 - protein, 29 aa, synthetic construct
HNYQNWRVYDVLVLNGSQLSARAADGSPC

SEQ ID NO: 35521 - protein, 29 aa, synthetic construct
GGSSKVFQVLNEKKHIYAIKYVNLEEADN

SEQ ID NO: 35522 - protein, 29 aa, synthetic construct
KLHEIYIQAKDKGASPEGAHCKVLVEVVD

SEQ ID NO: 35523 - protein, 29 aa, synthetic construct
KVIVVRNRRLGVLYHAVQLLILLYFVWYV

SEQ ID NO: 35524 - protein, 29 aa, synthetic construct
EKLDLRNNIISTVQQGAFLGLGELKRLDL

SEQ ID NO: 35525 - protein, 29 aa, synthetic construct
ETKSGPFEEKVIQVLYDPCRSADIALVAG

SEQ ID NO: 35526 - protein, 29 aa, synthetic construct
YEIEDGSTPNGRDLLFGFDPLAFPEFSWR

SEQ ID NO: 35527 - protein, 29 aa, synthetic construct
SPIIQQLEKSDAEYNNSPLVPTFCTPGLK

SEQ ID NO: 35528 - protein, 29 aa, synthetic construct
RSAYMLTDPYGSQAWLGVRGGLVLYNLPF

SEQ ID NO: 35529 - protein, 29 aa, synthetic construct
GQLRMEWETPDNQVSAEVQFRHRTPSSPW

SEQ ID NO: 35530 - protein, 29 aa, synthetic construct
LAENISHGLLLRKAAVLQYLYYLAQIGIA

SEQ ID NO: 35531 - protein, 29 aa, synthetic construct
STLHDWYGQEIVELQQCWQKRAQGSHSKC

SEQ ID NO: 35532 - protein, 29 aa, synthetic construct
PPRSNHAAEEASSEYEEEEEVQAMQSFNS

SEQ ID NO: 35533 - protein, 29 aa, synthetic construct
IPAAQVALAKQLAGNIALELQAYFRSKFP

SEQ ID NO: 35534 - protein, 29 aa, synthetic construct
KQIYAIKYVNLEEANNQTLDSYRNEIAYL

SEQ ID NO: 35535 - protein, 29 aa, synthetic construct
SGDEENAGTEEIKNKINGNWISASSINEA

SEQ ID NO: 35536 - protein, 29 aa, synthetic construct
RRHVCLTTLVIMGSRAVMDAYLVEQNQGP

SEQ ID NO: 35537 - protein, 29 aa, synthetic construct
HPSSPGGFGQTAGWQHRPGAAGLLSEQVP

SEQ ID NO: 35538 - protein, 29 aa, synthetic construct
SIKQDCFHCMEHDQHVTHSDISDPKNSKN

SEQ ID NO: 35539 - protein, 29 aa, synthetic construct
DGPSVSWSRQTQPPGALTGRGDAPNRSRN

SEQ ID NO: 35540 - protein, 29 aa, synthetic construct
FSGQPPGPPQAPPGIPGQASLLQAAPGAP

SEQ ID NO: 35541 - protein, 29 aa, synthetic construct
RGLREALLTRNMAASCRLEEEEYEDDAYG

SEQ ID NO: 35542 - protein, 29 aa, synthetic construct
FEGFPQSVLQIPVSSASSSTLVSIFQSSP

SEQ ID NO: 35543 - protein, 29 aa, synthetic construct
GRIECHYEPMESYFLKETSHESVDSSKEE

SEQ ID NO: 35544 - protein, 29 aa, synthetic construct
PPALPPPETAAAATPAAAASSSAASPHYQ

SEQ ID NO: 35545 - protein, 29 aa, synthetic construct
PRDPENFPFVVLGNNIDLENRQVATKRAQ

SEQ ID NO: 35546 - protein, 29 aa, synthetic construct
TQGSLRITNISSDDCGKQISCVAENLVGE

SEQ ID NO: 35547 - protein, 29 aa, synthetic construct
LISIITFCLETLPELRDERELLRHPPAPH

SEQ ID NO: 35548 - protein, 29 aa, synthetic construct
TGDSGAPPVPPTGDSGPPPVPPTGDSGAP

SEQ ID NO: 35549 - protein, 29 aa, synthetic construct
PDYGTATRRRPECGWGLHTRAYEDTADDG

SEQ ID NO: 35550 - protein, 29 aa, synthetic construct
DPGGERGPWWREGTVAVRGDPGGERGPWR

SEQ ID NO: 35551 - protein, 29 aa, synthetic construct
NDQKGSASLTVVQLCILINNIPDESQVEK

SEQ ID NO: 35552 - protein, 29 aa, synthetic construct
KMGSRSTSESRSRSHSRSRSASSNSRKSL

SEQ ID NO: 35553 - protein, 29 aa, synthetic construct
TASTESSETTTATTTGSETTTASTEGSET

SEQ ID NO: 35554 - protein, 29 aa, synthetic construct
DSGAPPVPPTGDAGAPPVPPTGDSGAPPV

SEQ ID NO: 35555 - protein, 29 aa, synthetic construct
NPVPDISWRRLDGSQLPGKVKYSKSQAIL

SEQ ID NO: 35556 - protein, 29 aa, synthetic construct
DGETCLLDILDTAGREEYSAMRDQYMRTG

SEQ ID NO: 35557 - protein, 26 aa, synthetic construct
YGFGSTSGGPLMHSHYFSSSGNGINF

SEQ ID NO: 35558 - protein, 29 aa, synthetic construct
DAVGVCLLGDKLYALGGYDGQAYLNTVEA

SEQ ID NO: 35559 - protein, 29 aa, synthetic construct
TEELNKQVVSSSEQPQSYQAEIIELRRTV

SEQ ID NO: 35560 - protein, 29 aa, synthetic construct
NSFPQIFRDRTDIQYLIPCAIDQDPYFRM

SEQ ID NO: 35561 - protein, 29 aa, synthetic construct
EPVNGRHTLGENIANNGGLKAAYRAYQNW

SEQ ID NO: 35562 - protein, 29 aa, synthetic construct
FTGGLHRELPLHLNTRYGAVIKRLSHLEV

SEQ ID NO: 35563 - protein, 29 aa, synthetic construct
ATRLLKLRYLILGSDVGGGYTAKKTFDQW

SEQ ID NO: 35564 - protein, 29 aa, synthetic construct
TYVTFSPNGTELLVSMGGEQVYLFDLTYK

SEQ ID NO: 35565 - protein, 29 aa, synthetic construct
DTSGWKVVKTSVQWYAPIVPATQEANTGG

SEQ ID NO: 35566 - protein, 29 aa, synthetic construct
FCEYWLFYTIMAYTLTYISSVLQANLRDS

SEQ ID NO: 35567 - protein, 29 aa, synthetic construct
VIIVGNGPSGICLSFLLSGYTPYTKPDAI

SEQ ID NO: 35568 - protein, 29 aa, synthetic construct
GMQMFFYVTLAGSEYFLLATMAYDRYVAI

SEQ ID NO: 35569 - protein, 29 aa, synthetic construct
YGVDDKFYSKLDQEVALLGSYPVDDGCRI

SEQ ID NO: 35570 - protein, 29 aa, synthetic construct
TLTNHRKIYTEEKPDKCEEYNKSPKQLST

SEQ ID NO: 35571 - protein, 29 aa, synthetic construct
DYDPKLQMQEGVRSEFAMAGHENLSHGHT

SEQ ID NO: 35572 - protein, 29 aa, synthetic construct
CGVLDKAHYGSSAYCLVHCCYEIYGGETS

SEQ ID NO: 35573 - protein, 29 aa, synthetic construct
QKKGIQVLPDGRVTDIPQGMVTDQFGMIG

SEQ ID NO: 35574 - protein, 29 aa, synthetic construct
MPSLKMPKVDLKGPEVDIKGPKLDLKDPK

SEQ ID NO: 35575 - protein, 29 aa, synthetic construct
YSTPSGCLELTDSCHPYRSAFYILEQQRV

SEQ ID NO: 35576 - protein, 29 aa, synthetic construct
FPQIILSGSQLAPEKHYEISRDGRLRSRS

SEQ ID NO: 35577 - protein, 29 aa, synthetic construct
AVEFTTLADYLHLLHAAAQALNPLGPSAM

SEQ ID NO: 35578 - protein, 17 aa, synthetic construct
MDPAEEGRIYKCLFTGS

SEQ ID NO: 35579 - protein, 29 aa, synthetic construct
EDLDQTVVSITDVDLIYQNEFLGCTDRLV

SEQ ID NO: 35580 - protein, 29 aa, synthetic construct
CQGELLTLITFGCSVEFGPAEFIPLHPLI

SEQ ID NO: 35581 - protein, 29 aa, synthetic construct
CMASLVHLAFQIYETLRPRYLEIRAVMEQ

SEQ ID NO: 35582 - protein, 29 aa, synthetic construct
LGDSFDPGTVMRFSSEAGHVLRGSSERTC

SEQ ID NO: 35583 - protein, 29 aa, synthetic construct
ITRLHQYIFSHILRPEKPALEFKPTDADS

SEQ ID NO: 35584 - protein, 29 aa, synthetic construct
FMKGSPEDKSRLMFAMYDLDENGFLSKDE

SEQ ID NO: 35585 - protein, 29 aa, synthetic construct
EGGDLHTLIIAEAFDDDTGRYTCLATNPS

SEQ ID NO: 35586 - protein, 29 aa, synthetic construct
SENTDVFKFSIELFYTMGRALLSLQKFKE

SEQ ID NO: 35587 - protein, 29 aa, synthetic construct
FGEEVEKSTSVTYTLTIVPSSASAYVSEE

SEQ ID NO: 35588 - protein, 29 aa, synthetic construct
VKPADLKKRIESLINRDYMERDKENPNQY

SEQ ID NO: 35589 - protein, 29 aa, synthetic construct
EVDPLSDKGTTPLQFAIIRERSSCVKILL

SEQ ID NO: 35590 - protein, 29 aa, synthetic construct
QQNPVSEASDIWAMAVISYLSLTCSSPFA

SEQ ID NO: 35591 - protein, 29 aa, synthetic construct
DDSRCLYTHEEYISFVLNSGSGLSHDYAN

SEQ ID NO: 35592 - protein, 29 aa, synthetic construct
QHAFYQLIHQGTKMMPCDFLIPVQTQHPI

SEQ ID NO: 35593 - protein, 29 aa, synthetic construct
AQEFFIHGFSVLESPVLLIMSFDRFLAIH

SEQ ID NO: 35594 - protein, 29 aa, synthetic construct
APYDPRWMLAGRPHQTLKGTWQSGFFDHG

SEQ ID NO: 35595 - protein, 29 aa, synthetic construct
DVEKNNSRIKLGLKRLVSKGTLVQTKGTG

SEQ ID NO: 35596 - protein, 29 aa, synthetic construct
YAKGALQYLVPILTHTLTKQDENDDDDDW

SEQ ID NO: 35597 - protein, 29 aa, synthetic construct
HVQREKAPRRRSLKENLVPQINLASSFFP

SEQ ID NO: 35598 - protein, 29 aa, synthetic construct
LLELQNEAVFMWTAKLENIATLCFKALEN

SEQ ID NO: 35599 - protein, 29 aa, synthetic construct
HKEKYTLEQALLSAIQEIEMHADNPAAIQ

SEQ ID NO: 35600 - protein, 29 aa, synthetic construct
LRISLLGRSWLLPPVTLDQFICLGRAQGL

SEQ ID NO: 35601 - protein, 29 aa, synthetic construct
LFDIARIERCNQLLQALKLVITALKCHKY

SEQ ID NO: 35602 - protein, 29 aa, synthetic construct
VIPNDISSNAAILGRQPPNVTSNSGILGV

SEQ ID NO: 35603 - protein, 29 aa, synthetic construct
SLHSNQEKIKVLLNIIQDLEKARALTEGR

SEQ ID NO: 35604 - protein, 29 aa, synthetic construct
SQNRNPDALTGNVNMLAAKIAVLSSSCTI

SEQ ID NO: 35605 - protein, 29 aa, synthetic construct
FSNQAESMMVPGNATGVAKQFLRCIFHQL

SEQ ID NO: 35606 - protein, 29 aa, synthetic construct
LSPPALATHYMPYGLALTVIGFLLPFAAL

SEQ ID NO: 35607 - protein, 29 aa, synthetic construct
CKECGKSFSRRGQFAEHQKIHTGVKPYKC

SEQ ID NO: 35608 - protein, 20 aa, synthetic construct
WGWAIIKSYDLDPGDGSLEI

SEQ ID NO: 35609 - protein, 29 aa, synthetic construct
VPITGMPAVCSPGMLPVALPPAAVNAQPR

SEQ ID NO: 35610 - protein, 29 aa, synthetic construct
EKVKPRKDAHLFSIRAIMWHVIARDFGQS

SEQ ID NO: 35611 - protein, 29 aa, synthetic construct
EGGQAPFHYFLGGTGLHPAAPGAPGGRTS

SEQ ID NO: 35612 - protein, 29 aa, synthetic construct
MAELRQVPGGRETPLGELRPEVVEDEVPR

SEQ ID NO: 35613 - protein, 29 aa, synthetic construct
LPTPPTMAIIRALNIAHLIDGILVAPCYF

SEQ ID NO: 35614 - protein, 29 aa, synthetic construct
QTYWLDPAKTLAEHRELINTGPPYTLYFG

SEQ ID NO: 35615 - protein, 29 aa, synthetic construct
ITVSPNEKHLFRGLRLNGDLLAQEAQFVV

SEQ ID NO: 35616 - protein, 29 aa, synthetic construct
GCQPGAEANIAPMCFLANVAHANRVRVGS

SEQ ID NO: 35617 - protein, 29 aa, synthetic construct
GEACKKVFLDCCNYMTELRRQHARASHLG

SEQ ID NO: 35618 - protein, 29 aa, synthetic construct
LCITISYTMILQAVLSLSSADARQKAFST

SEQ ID NO: 35619 - protein, 29 aa, synthetic construct
EGTPGSRAAHALSRKGHRVHELPTSSPGG

SEQ ID NO: 35620 - protein, 29 aa, synthetic construct
GVILYEALFGQPPFPSRSFSELEEKIRSN

SEQ ID NO: 35621 - protein, 29 aa, synthetic construct
YQHSLGELLLLLAAQPPGRRRELLHTEVQ

SEQ ID NO: 35622 - protein, 29 aa, synthetic construct
SLKLKSKTTSWEDKPKLAHFAWISHQCFL

SEQ ID NO: 35623 - protein, 29 aa, synthetic construct
GHSLQRHHSVEAAGRPRASTSSSGSVRSP

SEQ ID NO: 35624 - protein, 29 aa, synthetic construct
MVAHGLLRPMVAPQNGDPDPGASVGSSRS

SEQ ID NO: 35625 - protein, 29 aa, synthetic construct
DEDLDYTPTSASFVSKQPTLQAAELIDSE

SEQ ID NO: 35626 - protein, 29 aa, synthetic construct
RSWQPVSRIPMPPSRPQPRGAPRQRPIPL

SEQ ID NO: 35627 - protein, 29 aa, synthetic construct
GPPPKPPVSSGSGSLSSSSSCSSRKVKLQ

SEQ ID NO: 35628 - protein, 29 aa, synthetic construct
GPSWDLPAAPGRDPSAGRGAEASAAGPPG

SEQ ID NO: 35629 - protein, 29 aa, synthetic construct
DADTDTAGESALPTITARQRVWRAFENPH

SEQ ID NO: 35630 - protein, 29 aa, synthetic construct
TQDQLLLPHAGYARAWSPAEDSRIRLTAR

SEQ ID NO: 35631 - protein, 29 aa, synthetic construct
QDQLILQIISLMDKRLRKENLDLKLTPYK

SEQ ID NO: 35632 - protein, 29 aa, synthetic construct
PKSLNLLPEAKHPGEPQRGFKPKTRTPEE

SEQ ID NO: 35633 - protein, 20 aa, synthetic construct
LDCATNEENPVISGKQIVQQ

SEQ ID NO: 35634 - protein, 29 aa, synthetic construct
QHPRSPGAPCQECSGCSLWTDPTEDDEKL

SEQ ID NO: 35635 - protein, 29 aa, synthetic construct
AAPTRNTCTTGITDTPPPDGSPNITSVSH

SEQ ID NO: 35636 - protein, 29 aa, synthetic construct
SSGLSSERSDSDQVMPNENGGTPNHRPTG

SEQ ID NO: 35637 - protein, 29 aa, synthetic construct
DRENIDDLNMEFNPLDHPRASTIFLSKSQ

SEQ ID NO: 35638 - protein, 29 aa, synthetic construct
NILRENDFEPKFLCKVKLAFKCDGEIKTF

SEQ ID NO: 35639 - protein, 29 aa, synthetic construct
LSHSSKIIIVNRNRKEMLLNSDIFWKPQE

SEQ ID NO: 35640 - protein, 29 aa, synthetic construct
NVDSEMMSNPPVRARASGVMSAPPVRALD

SEQ ID NO: 35641 - protein, 29 aa, synthetic construct
PTQRTYSSSLKRSSRRTISFRMKPKKENS

SEQ ID NO: 35642 - protein, 29 aa, synthetic construct
VKGAKPHFITSSVEQDSIRLPLEHLVEEQ

SEQ ID NO: 35643 - protein, 29 aa, synthetic construct
RCHLYCESRETGEVLSMKRMVHDGTRCSY

SEQ ID NO: 35644 - protein, 20 aa, synthetic construct
MEFNPLDHPRASTIFLSKSQ

SEQ ID NO: 35645 - protein, 29 aa, synthetic construct
GEKPYKCEGCGKAFRKVSTLNTHKAIHAE

SEQ ID NO: 35646 - protein, 29 aa, synthetic construct
RLALLCSEKPTHSLQRRIAQQLPRQLQMV

SEQ ID NO: 35647 - protein, 29 aa, synthetic construct
DRRAYPAQITPKMCPLEWCRREKLAQPVY

SEQ ID NO: 35648 - protein, 29 aa, synthetic construct
MLAHPLHVISMRCMLQFVGREAKYSGVLS

SEQ ID NO: 35649 - protein, 29 aa, synthetic construct
GLVGGLKNTLVHSNCWNSHGPSLLSQERS

SEQ ID NO: 35650 - protein, 29 aa, synthetic construct
SFIALVNCIDWVKGTKISSVDRILTALAI

SEQ ID NO: 35651 - protein, 29 aa, synthetic construct
THTHREPAGDGKSIKTFKESPKQILDPAA

SEQ ID NO: 35652 - protein, 29 aa, synthetic construct
TDPLIKSTILGFVSSFGQVPKQLFTKPHP

SEQ ID NO: 35653 - protein, 19 aa, synthetic construct
MRMDFQKKIAKINVGKRIA

SEQ ID NO: 35654 - protein, 29 aa, synthetic construct
IFIKSLFHNFPSIVMPNENGGTPNHRPTG

SEQ ID NO: 35655 - protein, 29 aa, synthetic construct
PCRHGGTCQDRDNASLCFCLKGTTGPNCE

SEQ ID NO: 35656 - protein, 29 aa, synthetic construct
PATRVEVSVSCRNLPDRDTFSKSDPICVL

SEQ ID NO: 35657 - protein, 29 aa, synthetic construct
IRAATEVLAALLKSRSNGRRAVNRGYVTS

SEQ ID NO: 35658 - protein, 29 aa, synthetic construct
AAEDLELRSEGLITKKCSSQQPPGSKTIF

SEQ ID NO: 35659 - protein, 29 aa, synthetic construct
KQSDCNVPDYLMYSAVSGSEKNSKIYCPT

SEQ ID NO: 35660 - protein, 29 aa, synthetic construct
DWRTNTLAKANKWTSHNVTVVQRTNTQPF

SEQ ID NO: 35661 - protein, 29 aa, synthetic construct
KAKRYHMDASGEAVRETLQFKAQDLLRAV

SEQ ID NO: 35662 - protein, 29 aa, synthetic construct
EPVNGRHTLGENIANNGGLKAAYRVWCSV

SEQ ID NO: 35663 - protein, 29 aa, synthetic construct
GERLMMPPAAFKGESGGLLVFPPAFYGAK

SEQ ID NO: 35664 - protein, 29 aa, synthetic construct
FSIVQNIVGTALMIFVAIGFKTKLAALTL

SEQ ID NO: 35665 - protein, 29 aa, synthetic construct
LCQGGNSTATLEPPTCPKDSGGNNHWVYV

SEQ ID NO: 35666 - protein, 29 aa, synthetic construct
MEVAQNGMAKEDGTRESAGGSPARSLTRS

SEQ ID NO: 35667 - protein, 29 aa, synthetic construct
EDVASSSSESEMEEKGEEEEEEPRLPPSD

SEQ ID NO: 35668 - protein, 19 aa, synthetic construct
RKVRTRSLSDFTGPLSSRP

SEQ ID NO: 35669 - protein, 95 aa, synthetic construct
TAVFTPYSAAFLLKARLLPSVATPASRWLWWTSSWTSCSLWTSSSTSAPPTSMPTRRWSATPAASPSTTSRAGSSSTWWPPSPSTCSSSALALRS

SEQ ID NO: 35670 - protein, 34 aa, synthetic construct
HRKVLRDNIQGITKSGYSPFGSARWRQAHFRSYL

SEQ ID NO: 35671 - protein, 109 aa, synthetic construct
PNKVQEHYNYTKETPGGLGLHRHPLLRHCGGKPSGAHCGGPKQQVPLGNVPVSGQPGRLRSTGRRGLRSQYLALWLCHAEADACAVVCPGGLCLHHALGLCLQPPGHRH

SEQ ID NO: 35672 - protein, 42 aa, synthetic construct
VTQLAIDTEERLKGSLTSFLRRPFQSPTSLWPMPTCAAASWR

SEQ ID NO: 35673 - protein, 41 aa, synthetic construct
MAPSPCCVPFPGCWPPPGSRAALQCDQSSTCESRRMPNLTG

SEQ ID NO: 35674 - protein, 16 aa, synthetic construct
SSGDLLRDNMLRGTVH

SEQ ID NO: 35675 - protein, 29 aa, synthetic construct
MFLEEHKYFEESFKFKWPNVSDIWSTYLT

SEQ ID NO: 35676 - protein, 17 aa, synthetic construct
MAALLQSDRVLYLVQGE

SEQ ID NO: 35677 - protein, 29 aa, synthetic construct
GTLPAETLLLSPPVEVKGEDGDREPEGTL

SEQ ID NO: 35678 - protein, 29 aa, synthetic construct
YSGALLVFLSLLGWTLWYTGNIEISRQEL

SEQ ID NO: 35679 - protein, 29 aa, synthetic construct
QWYKDAISISRLQNSRYKVLASGGLRIQK

SEQ ID NO: 35680 - protein, 29 aa, synthetic construct
AELVPRLFRVASKGHGGLLEVNLQNGILF

SEQ ID NO: 35681 - protein, 20 aa, synthetic construct
MALTSNLGKQIKLKEVEGTL

SEQ ID NO: 35682 - protein, 29 aa, synthetic construct
TAGLTMPTATLGNLQGYGMASPGLAAPSL

SEQ ID NO: 35683 - protein, 29 aa, synthetic construct
SRDVTVLLENYGKFKKGYLIFVVRFLFGL

SEQ ID NO: 35684 - protein, 29 aa, synthetic construct
KSNSLIHTECLSQVHRILRERFCRQSPHS

SEQ ID NO: 35685 - protein, 29 aa, synthetic construct
ELVPRLFRVASKGRRGLLEVNLQNGILFV

SEQ ID NO: 35686 - protein, 29 aa, synthetic construct
LAELVPRLFRVASKSRGGLLEVNLQNGIL

SEQ ID NO: 35687 - protein, 29 aa, synthetic construct
SSSSSPSPRSSSPSTSSSSTSSPSSSSPS

SEQ ID NO: 35688 - protein, 29 aa, synthetic construct
SPSSSSSSSSSSSSRPSSSSPSSSGSSPS

SEQ ID NO: 35689 - protein, 29 aa, synthetic construct
PSSSSSSPSPRSSSSSSSSSSTSSPSSSS

SEQ ID NO: 35690 - protein, 29 aa, synthetic construct
PLPVTDTSSASTRHTTPLPVTDTSSASTD

SEQ ID NO: 35691 - protein, 29 aa, synthetic construct
KISYSRIPESETESPASAPNSPRTPLTPP

SEQ ID NO: 35692 - protein, 29 aa, synthetic construct
PTSRATRGRKNRSSVKTPETLVPTAPKLE

SEQ ID NO: 35693 - protein, 29 aa, synthetic construct
KCCGLVNGAADWGNYFQHYPELCACLDKQ

SEQ ID NO: 35694 - protein, 29 aa, synthetic construct
PGSALEPGEEFEIVGRSQLPGPGDLRSAT

SEQ ID NO: 35695 - protein, 29 aa, synthetic construct
AHMRAHSVVFESDGSRGSEVHTTSADAPK

SEQ ID NO: 35696 - protein, 29 aa, synthetic construct
GQTDRQGQSFHYGQTDRQGQSSHYSQMDR

SEQ ID NO: 35697 - protein, 9 aa, synthetic construct
VSWGYIKFK

SEQ ID NO: 35698 - protein, 10 aa, synthetic construct
YSYYNLILKK

SEQ ID NO: 35699 - protein, 11 aa, synthetic construct
KVLYKSKTGKY

SEQ ID NO: 35700 - protein, 9 aa, synthetic construct
RQIAAVMSR

SEQ ID NO: 35701 - protein, 9 aa, synthetic construct
ASRAQILDK

SEQ ID NO: 35702 - protein, 10 aa, synthetic construct
GDVQHFDSSK

SEQ ID NO: 35703 - protein, 9 aa, synthetic construct
GTAGSCLRR

SEQ ID NO: 35704 - protein, 10 aa, synthetic construct
KASRAQILDK

SEQ ID NO: 35705 - protein, 10 aa, synthetic construct
KNYPTPRTSR

SEQ ID NO: 35706 - protein, 10 aa, synthetic construct
KWFSTLTRHK

SEQ ID NO: 35707 - protein, 11 aa, synthetic construct
KWFSTLTRHKR

SEQ ID NO: 35708 - protein, 9 aa, synthetic construct
GNLDGSMRK

SEQ ID NO: 35709 - protein, 11 aa, synthetic construct
PKVLYKSKTGK

SEQ ID NO: 35710 - protein, 11 aa, synthetic construct
FKWFSTLTRHK

SEQ ID NO: 35711 - protein, 11 aa, synthetic construct
KTGKYSFPHTY

SEQ ID NO: 35712 - protein, 11 aa, synthetic construct
RIRDGDFVVLK

SEQ ID NO: 35713 - protein, 11 aa, synthetic construct
SDYSYYNLILK

SEQ ID NO: 35714 - protein, 11 aa, synthetic construct
SIYAPLIAVLS

SEQ ID NO: 35715 - protein, 9 aa, synthetic construct
ISFDFRTTE

SEQ ID NO: 35716 - protein, 10 aa, synthetic construct
AASRAQILDK

SEQ ID NO: 35717 - protein, 11 aa, synthetic construct
SVSEMASNKFK

SEQ ID NO: 35718 - protein, 9 aa, synthetic construct
GVRSGSGHR

SEQ ID NO: 35719 - protein, 11 aa, synthetic construct
AVMSRAQGLPK

SEQ ID NO: 35720 - protein, 11 aa, synthetic construct
RLPRIPPPLPK

SEQ ID NO: 35721 - protein, 10 aa, synthetic construct
KVLYKSKTGK

SEQ ID NO: 35722 - protein, 9 aa, synthetic construct
RVNAQTAVR

SEQ ID NO: 35723 - protein, 10 aa, synthetic construct
HYLYLAMLER

SEQ ID NO: 35724 - protein, 9 aa, synthetic construct
SYYNLILKK

SEQ ID NO: 35725 - protein, 10 aa, synthetic construct
SISFDFRTTE

SEQ ID NO: 35726 - protein, 9 aa, synthetic construct
GTKGGVSYR

SEQ ID NO: 35727 - protein, 10 aa, synthetic construct
VLYKSKTGKY

SEQ ID NO: 35728 - protein, 11 aa, synthetic construct
KAFKWFSTLTR

SEQ ID NO: 35729 - protein, 10 aa, synthetic construct
VVLKREDVFK

SEQ ID NO: 35730 - protein, 11 aa, synthetic construct
GLKTADGKGEK

SEQ ID NO: 35731 - protein, 9 aa, synthetic construct
IIADFCFLR

SEQ ID NO: 35732 - protein, 11 aa, synthetic construct
AFKWFSTLTRH

SEQ ID NO: 35733 - protein, 9 aa, synthetic construct
YSYYNLILK

SEQ ID NO: 35734 - protein, 10 aa, synthetic construct
SVSWGYIKFK

SEQ ID NO: 35735 - protein, 9 aa, synthetic construct
KTADGKGEK

SEQ ID NO: 35736 - protein, 10 aa, synthetic construct
VLNSTSFLYY

SEQ ID NO: 35737 - protein, 9 aa, synthetic construct
RTEFHQHQH

SEQ ID NO: 35738 - protein, 10 aa, synthetic construct
RRQIAAVMSR

SEQ ID NO: 35739 - protein, 10 aa, synthetic construct
RGTKGGVSYR

SEQ ID NO: 35740 - protein, 11 aa, synthetic construct
GSISFDFRTTE

SEQ ID NO: 35741 - protein, 8 aa, synthetic construct
RIPPPLPK

SEQ ID NO: 35742 - protein, 9 aa, synthetic construct
KWFSTLTRH

SEQ ID NO: 35743 - protein, 8 aa, synthetic construct
KWFSTLTR

SEQ ID NO: 35744 - protein, 11 aa, synthetic construct
RRGTKGGVSYR

SEQ ID NO: 35745 - protein, 9 aa, synthetic construct
VLYKSKTGK

SEQ ID NO: 35746 - protein, 11 aa, synthetic construct
EVGNLDGSMRK

SEQ ID NO: 35747 - protein, 9 aa, synthetic construct
DVQHFDSSK

SEQ ID NO: 35748 - protein, 11 aa, synthetic construct
IIADFCFLRIR

SEQ ID NO: 35749 - protein, 11 aa, synthetic construct
EGAFRDSNYLR

SEQ ID NO: 35750 - protein, 9 aa, synthetic construct
YAPLIAVLS

SEQ ID NO: 35751 - protein, 9 aa, synthetic construct
SWGYIKFKR

SEQ ID NO: 35752 - protein, 11 aa, synthetic construct
RENYDIIKTYH

SEQ ID NO: 35753 - protein, 9 aa, synthetic construct
EMASNKFKR

SEQ ID NO: 35754 - protein, 10 aa, synthetic construct
GAFRDSNYLR

SEQ ID NO: 35755 - protein, 9 aa, synthetic construct
TADGKGEKR

SEQ ID NO: 35756 - protein, 11 aa, synthetic construct
EKNYPTPRTSR

SEQ ID NO: 35757 - protein, 10 aa, synthetic construct
TVCDKIAQLR

SEQ ID NO: 35758 - protein, 10 aa, synthetic construct
AFKWFSTLTR

SEQ ID NO: 35759 - protein, 8 aa, synthetic construct
QIAAVMSR

SEQ ID NO: 35760 - protein, 10 aa, synthetic construct
PLWGVRSGSG

SEQ ID NO: 35761 - protein, 9 aa, synthetic construct
NYPTPRTSR

SEQ ID NO: 35762 - protein, 9 aa, synthetic construct
DLDDDSHER

SEQ ID NO: 35763 - protein, 10 aa, synthetic construct
WFSTLTRHKR

SEQ ID NO: 35764 - protein, 8 aa, synthetic construct
TKGGVSYR

SEQ ID NO: 35765 - protein, 10 aa, synthetic construct
YIKFKRMLNR

SEQ ID NO: 35766 - protein, 8 aa, synthetic construct
MADVSLHR

SEQ ID NO: 35767 - protein, 10 aa, synthetic construct
PPPLPKPASR

SEQ ID NO: 35768 - protein, 9 aa, synthetic construct
AFRDSNYLR

SEQ ID NO: 35769 - protein, 10 aa, synthetic construct
ENYDIIKTYH

SEQ ID NO: 35770 - protein, 10 aa, synthetic construct
DLGTAGSCLR

SEQ ID NO: 35771 - protein, 11 aa, synthetic construct
IPPPLPKPASR

SEQ ID NO: 35772 - protein, 10 aa, synthetic construct
VIIADFCFLR

SEQ ID NO: 35773 - protein, 9 aa, synthetic construct
NYDIIKTYH

SEQ ID NO: 35774 - protein, 11 aa, synthetic construct
EVIIADFCFLR

SEQ ID NO: 35775 - protein, 11 aa, synthetic construct
SVSWGYIKFKR

SEQ ID NO: 35776 - protein, 11 aa, synthetic construct
GKYSFPHTYIR

SEQ ID NO: 35777 - protein, 10 aa, synthetic construct
KTADGKGEKR

SEQ ID NO: 35778 - protein, 10 aa, synthetic construct
IYAPLIAVLS

SEQ ID NO: 35779 - protein, 9 aa, synthetic construct
WFSTLTRHK

SEQ ID NO: 35780 - protein, 10 aa, synthetic construct
VSWGYIKFKR

SEQ ID NO: 35781 - protein, 11 aa, synthetic construct
ERRQIAAVMSR

SEQ ID NO: 35782 - protein, 9 aa, synthetic construct
DSSENDLVR

SEQ ID NO: 35783 - protein, 9 aa, synthetic construct
QPPPAPAPQ

SEQ ID NO: 35784 - protein, 9 aa, synthetic construct
APPPLQTAS

SEQ ID NO: 35785 - protein, 9 aa, synthetic construct
KAFKWFSTL

SEQ ID NO: 35786 - protein, 10 aa, synthetic construct
APLIAVLSGL

SEQ ID NO: 35787 - protein, 9 aa, synthetic construct
ASAPLTTPP

SEQ ID NO: 35788 - protein, 8 aa, synthetic construct
ASAPLTTP

SEQ ID NO: 35789 - protein, 11 aa, synthetic construct
SPLGGPVPSAL

SEQ ID NO: 35790 - protein, 8 aa, synthetic construct
APQPVQSH

SEQ ID NO: 35791 - protein, 10 aa, synthetic construct
APPPLQTASA

SEQ ID NO: 35792 - protein, 9 aa, synthetic construct
RLPRIPPPL

SEQ ID NO: 35793 - protein, 10 aa, synthetic construct
RIRDGDFVVL

SEQ ID NO: 35794 - protein, 11 aa, synthetic construct
TASAPLTTPPL

SEQ ID NO: 35795 - protein, 9 aa, synthetic construct
LPRIPPPLP

SEQ ID NO: 35796 - protein, 8 aa, synthetic construct
LPRIPPPL

SEQ ID NO: 35797 - protein, 9 aa, synthetic construct
SPLGGPVPS

SEQ ID NO: 35798 - protein, 9 aa, synthetic construct
TASAPLTTP

SEQ ID NO: 35799 - protein, 8 aa, synthetic construct
RPGPKGSI

SEQ ID NO: 35800 - protein, 9 aa, synthetic construct
STAFSIDSL

SEQ ID NO: 35801 - protein, 11 aa, synthetic construct
APQPVQSHPPI

SEQ ID NO: 35802 - protein, 10 aa, synthetic construct
APIPQGFSCL

SEQ ID NO: 35803 - protein, 9 aa, synthetic construct
YPTPRTSRT

SEQ ID NO: 35804 - protein, 8 aa, synthetic construct
EPNGLILF

SEQ ID NO: 35805 - protein, 9 aa, synthetic construct
APQPVQSHP

SEQ ID NO: 35806 - protein, 10 aa, synthetic construct
SPLGGPVPSA

SEQ ID NO: 35807 - protein, 8 aa, synthetic construct
NPLELQSL

SEQ ID NO: 35808 - protein, 10 aa, synthetic construct
PPLQTASAPL

SEQ ID NO: 35809 - protein, 9 aa, synthetic construct
GPLWVRGSL

SEQ ID NO: 35810 - protein, 10 aa, synthetic construct
APSGHPLSAV

SEQ ID NO: 35811 - protein, 11 aa, synthetic construct
APSGHPLSAVS

SEQ ID NO: 35812 - protein, 10 aa, synthetic construct
AGPLWVRGSL

SEQ ID NO: 35813 - protein, 8 aa, synthetic construct
PLWVRGSL

SEQ ID NO: 35814 - protein, 9 aa, synthetic construct
TTEPNGLIL

SEQ ID NO: 35815 - protein, 11 aa, synthetic construct
ALRLPRIPPPL

SEQ ID NO: 35816 - protein, 10 aa, synthetic construct
RLPRIPPPLP

SEQ ID NO: 35817 - protein, 8 aa, synthetic construct
IPQGFSCL

SEQ ID NO: 35818 - protein, 11 aa, synthetic construct
LYYPDPVLEPL

SEQ ID NO: 35819 - protein, 11 aa, synthetic construct
YPTPRTSRTGH

SEQ ID NO: 35820 - protein, 9 aa, synthetic construct
MSEPPHNNM

SEQ ID NO: 35821 - protein, 11 aa, synthetic construct
GAPSGHPLSAV

SEQ ID NO: 35822 - protein, 11 aa, synthetic construct
YPGRPGPKGSI

SEQ ID NO: 35823 - protein, 10 aa, synthetic construct
AAPIPQGFSC

SEQ ID NO: 35824 - protein, 10 aa, synthetic construct
APAPQPVQSH

SEQ ID NO: 35825 - protein, 11 aa, synthetic construct
APAPQPVQSHP

SEQ ID NO: 35826 - protein, 9 aa, synthetic construct
QPVQSHPPI

SEQ ID NO: 35827 - protein, 8 aa, synthetic construct
APAPQPVQ

SEQ ID NO: 35828 - protein, 9 aa, synthetic construct
APAPQPVQS

SEQ ID NO: 35829 - protein, 11 aa, synthetic construct
AAPIPQGFSCL

SEQ ID NO: 35830 - protein, 9 aa, synthetic construct
TPRTSRTGH

SEQ ID NO: 35831 - protein, 9 aa, synthetic construct
SAASRAQIL

SEQ ID NO: 35832 - protein, 11 aa, synthetic construct
QPPPAPAPQPV

SEQ ID NO: 35833 - protein, 9 aa, synthetic construct
MAAPIPQGF

SEQ ID NO: 35834 - protein, 10 aa, synthetic construct
GPLWVRGSLV

SEQ ID NO: 35835 - protein, 9 aa, synthetic construct
PPPLPKPAS

SEQ ID NO: 35836 - protein, 11 aa, synthetic construct
GPLWVRGSLVL

SEQ ID NO: 35837 - protein, 11 aa, synthetic construct
HAGPLWVRGSL

SEQ ID NO: 35838 - protein, 11 aa, synthetic construct
ASAPLTTPPLE

SEQ ID NO: 35839 - protein, 10 aa, synthetic construct
ASAPLTTPPL

SEQ ID NO: 35840 - protein, 10 aa, synthetic construct
SESHGSSSAS

SEQ ID NO: 35841 - protein, 10 aa, synthetic construct
RTTEPNGLIL

SEQ ID NO: 35842 - protein, 9 aa, synthetic construct
PPAPAPQPV

SEQ ID NO: 35843 - protein, 9 aa, synthetic construct
AVMSRAQGL

SEQ ID NO: 35844 - protein, 10 aa, synthetic construct
RPGPKGSIGF

SEQ ID NO: 35845 - protein, 11 aa, synthetic construct
QPRFQSAASRA

SEQ ID NO: 35846 - protein, 8 aa, synthetic construct
APIPQGFS

SEQ ID NO: 35847 - protein, 9 aa, synthetic construct
APIPQGFSC

SEQ ID NO: 35848 - protein, 11 aa, synthetic construct
IPQGFSCLSRF

SEQ ID NO: 35849 - protein, 11 aa, synthetic construct
APIPQGFSCLS

SEQ ID NO: 35850 - protein, 8 aa, synthetic construct
HPLSAVSF

SEQ ID NO: 35851 - protein, 9 aa, synthetic construct
HPLSAVSFA

SEQ ID NO: 35852 - protein, 10 aa, synthetic construct
DGSMRKVLVW

SEQ ID NO: 35853 - protein, 9 aa, synthetic construct
GSMRKVLVW

SEQ ID NO: 35854 - protein, 10 aa, synthetic construct
TTEPNGLILF

SEQ ID NO: 35855 - protein, 9 aa, synthetic construct
KSKTGKYSF

SEQ ID NO: 35856 - protein, 10 aa, synthetic construct
LGDLIMALAW

SEQ ID NO: 35857 - protein, 9 aa, synthetic construct
TAGSCLRRF

SEQ ID NO: 35858 - protein, 11 aa, synthetic construct
KEDGVGDVQHF

SEQ ID NO: 35859 - protein, 9 aa, synthetic construct
ASKDTAPSI

SEQ ID NO: 35860 - protein, 9 aa, synthetic construct
QSAASRAQI

SEQ ID NO: 35861 - protein, 10 aa, synthetic construct
YAYGLKTADG

SEQ ID NO: 35862 - protein, 9 aa, synthetic construct
RTTEPNGLI

SEQ ID NO: 35863 - protein, 10 aa, synthetic construct
FSCLSRFLGW

SEQ ID NO: 35864 - protein, 11 aa, synthetic construct
FSCLSRFLGWW

SEQ ID NO: 35865 - protein, 9 aa, synthetic construct
DSNYLRLLF

SEQ ID NO: 35866 - protein, 9 aa, synthetic construct
KQTESDYSY

SEQ ID NO: 35867 - protein, 10 aa, synthetic construct
FSVVGMDSDW

SEQ ID NO: 35868 - protein, 9 aa, synthetic construct
TAFSIDSLI

SEQ ID NO: 35869 - protein, 9 aa, synthetic construct
GGLQIAPVF

SEQ ID NO: 35870 - protein, 10 aa, synthetic construct
GSMRKVLVWQ

SEQ ID NO: 35871 - protein, 9 aa, synthetic construct
KAIVSSGTL

SEQ ID NO: 35872 - protein, 11 aa, synthetic construct
LDGSMRKVLVW

SEQ ID NO: 35873 - protein, 9 aa, synthetic construct
RGTKGGVSY

SEQ ID NO: 35874 - protein, 11 aa, synthetic construct
GTVSAELSSPW

SEQ ID NO: 35875 - protein, 11 aa, synthetic construct
LADEVITVFSV

SEQ ID NO: 35876 - protein, 11 aa, synthetic construct
RTTEPNGLILF

SEQ ID NO: 35877 - protein, 9 aa, synthetic construct
FTSLNPLEL

SEQ ID NO: 35878 - protein, 8 aa, synthetic construct
SMRKVLVW

SEQ ID NO: 35879 - protein, 10 aa, synthetic construct
YKSKTGKYSF

SEQ ID NO: 35880 - protein, 10 aa, synthetic construct
RDSNYLRLLF

SEQ ID NO: 35881 - protein, 9 aa, synthetic construct
TVCDKIAQL

SEQ ID NO: 35882 - protein, 9 aa, synthetic construct
FLYYPDPVL

SEQ ID NO: 35883 - protein, 11 aa, synthetic construct
RAQILDKATEY

SEQ ID NO: 35884 - protein, 9 aa, synthetic construct
IAVLSGLIV

SEQ ID NO: 35885 - protein, 10 aa, synthetic construct
HMSEPPHNNM

SEQ ID NO: 35886 - protein, 9 aa, synthetic construct
RAHGQDLGT

SEQ ID NO: 35887 - protein, 9 aa, synthetic construct
MASNKFKRM

SEQ ID NO: 35888 - protein, 8 aa, synthetic construct
LSAVSFAY

SEQ ID NO: 35889 - protein, 9 aa, synthetic construct
LGGPVPSAL

SEQ ID NO: 35890 - protein, 8 aa, synthetic construct
TAFSIDSL

SEQ ID NO: 35891 - protein, 9 aa, synthetic construct
ITVFSVVGM

SEQ ID NO: 35892 - protein, 8 aa, synthetic construct
YSYYNLIL

SEQ ID NO: 35893 - protein, 8 aa, synthetic construct
GAFRDSNY

SEQ ID NO: 35894 - protein, 9 aa, synthetic construct
GAFRDSNYL

SEQ ID NO: 35895 - protein, 8 aa, synthetic construct
TSLNPLEL

SEQ ID NO: 35896 - protein, 9 aa, synthetic construct
GKYSFPHTY

SEQ ID NO: 35897 - protein, 9 aa, synthetic construct
FRTTEPNGL

SEQ ID NO: 35898 - protein, 9 aa, synthetic construct
SGHRQLLSV

SEQ ID NO: 35899 - protein, 10 aa, synthetic construct
NYDIIKTYHY

SEQ ID NO: 35900 - protein, 10 aa, synthetic construct
YYPDPVLEPL

SEQ ID NO: 35901 - protein, 9 aa, synthetic construct
KHQLVRDSC

SEQ ID NO: 35902 - protein, 9 aa, synthetic construct
IKTYHYLYL

SEQ ID NO: 35903 - protein, 9 aa, synthetic construct
QRVNAQTAV

SEQ ID NO: 35904 - protein, 9 aa, synthetic construct
TEPNGLILF

SEQ ID NO: 35905 - protein, 9 aa, synthetic construct
TYHYLYLAM

SEQ ID NO: 35906 - protein, 9 aa, synthetic construct
IRDGDFVVL

SEQ ID NO: 35907 - protein, 9 aa, synthetic construct
YHYLYLAML

SEQ ID NO: 35908 - protein, 11 aa, synthetic construct
FRTTEPNGLIL

SEQ ID NO: 35909 - protein, 11 aa, synthetic construct
IYKQTESDYSY

SEQ ID NO: 35910 - protein, 9 aa, synthetic construct
QHFDSSKIM

SEQ ID NO: 35911 - protein, 9 aa, synthetic construct
AFLRTVQAL

SEQ ID NO: 35912 - protein, 9 aa, synthetic construct
TWMKAIVSS

SEQ ID NO: 35913 - protein, 11 aa, synthetic construct
HRRGTKGGVSY

SEQ ID NO: 35914 - protein, 9 aa, synthetic construct
ERRQIAAVM

SEQ ID NO: 35915 - protein, 9 aa, synthetic construct
LWVRGSLVL

SEQ ID NO: 35916 - protein, 9 aa, synthetic construct
DYSYYNLIL

SEQ ID NO: 35917 - protein, 10 aa, synthetic construct
TGKYSFPHTY

SEQ ID NO: 35918 - protein, 9 aa, synthetic construct
GHPLSAVSF

SEQ ID NO: 35919 - protein, 8 aa, synthetic construct
YHYLYLAM

SEQ ID NO: 35920 - protein, 10 aa, synthetic construct
FRDSNYLRLL

SEQ ID NO: 35921 - protein, 11 aa, synthetic construct
FRDSNYLRLLF

SEQ ID NO: 35922 - protein, 9 aa, synthetic construct
LYKSKTGKY

SEQ ID NO: 35923 - protein, 9 aa, synthetic construct
FRDSNYLRL

SEQ ID NO: 35924 - protein, 8 aa, synthetic construct
RRQIAAVM

SEQ ID NO: 35925 - protein, 10 aa, synthetic construct
RRGTKGGVSY

SEQ ID NO: 35926 - protein, 9 aa, synthetic construct
GYIKFKRML

SEQ ID NO: 35927 - protein, 10 aa, synthetic construct
SGHPLSAVSF

SEQ ID NO: 35928 - protein, 15 aa, synthetic construct
CGKAFKWFSTLTRHK

SEQ ID NO: 35929 - protein, 15 aa, synthetic construct
VPSLQGEKASRAQIL

SEQ ID NO: 35930 - protein, 15 aa, synthetic construct
AFLRTVQALLSNSSM

SEQ ID NO: 35931 - protein, 15 aa, synthetic construct
FLRTVQALLSNSSML

SEQ ID NO: 35932 - protein, 15 aa, synthetic construct
RHSVSEMASNKFKRM

SEQ ID NO: 35933 - protein, 15 aa, synthetic construct
TRHSVSEMASNKFKR

SEQ ID NO: 35934 - protein, 15 aa, synthetic construct
SMRKVLVWQNLDSPR

SEQ ID NO: 35935 - protein, 15 aa, synthetic construct
PPPYLRTEFHQHQHQ

SEQ ID NO: 35936 - protein, 15 aa, synthetic construct
TSGIIASKDTAPSII

SEQ ID NO: 35937 - protein, 15 aa, synthetic construct
LRTVQALLSNSSMLP

SEQ ID NO: 35938 - protein, 15 aa, synthetic construct
AIVSSGTLGDRMAAM

SEQ ID NO: 35939 - protein, 15 aa, synthetic construct
VGDVQHFDSSKIMEE

SEQ ID NO: 35940 - protein, 15 aa, synthetic construct
SLNPLELQSLDVGNV

SEQ ID NO: 35941 - protein, 15 aa, synthetic construct
GLQIAPVFIQDAGNY

SEQ ID NO: 35942 - protein, 15 aa, synthetic construct
ADFCFLRIRTKGGNS

SEQ ID NO: 35943 - protein, 15 aa, synthetic construct
DFCFLRIRTKGGNSA

SEQ ID NO: 35944 - protein, 15 aa, synthetic construct
FDALDLDDDSHERYS

SEQ ID NO: 35945 - protein, 15 aa, synthetic construct
MKAIVSSGTLGDRMA

SEQ ID NO: 35946 - protein, 15 aa, synthetic construct
MRKVLVWQNLDSPRA

SEQ ID NO: 35947 - protein, 15 aa, synthetic construct
PPPLQTASAPLTTPP

SEQ ID NO: 35948 - protein, 15 aa, synthetic construct
STWMKAIVSSGTLGD

SEQ ID NO: 35949 - protein, 15 aa, synthetic construct
ECGKAFKWFSTLTRH

SEQ ID NO: 35950 - protein, 15 aa, synthetic construct
TWMKAIVSSGTLGDR

SEQ ID NO: 35951 - protein, 15 aa, synthetic construct
DGYYRGEGTQDEEEG

SEQ ID NO: 35952 - protein, 15 aa, synthetic construct
EERRQIAAVMSRAQG

SEQ ID NO: 35953 - protein, 15 aa, synthetic construct
ESGGLQIAPVFIQDA

SEQ ID NO: 35954 - protein, 15 aa, synthetic construct
RTVQALLSNSSMLPT

SEQ ID NO: 35955 - protein, 15 aa, synthetic construct
ADEVITVFSVVGMDS

SEQ ID NO: 35956 - protein, 15 aa, synthetic construct
HSVSEMASNKFKRML

SEQ ID NO: 35957 - protein, 15 aa, synthetic construct
FKRMLNRELTHLSEM

SEQ ID NO: 35958 - protein, 15 aa, synthetic construct
KAIVSSGTLGDRMAA

SEQ ID NO: 35959 - protein, 15 aa, synthetic construct
APSIIVASGNIGSEL

SEQ ID NO: 35960 - protein, 15 aa, synthetic construct
SGGLQIAPVFIQDAG

SEQ ID NO: 35961 - protein, 15 aa, synthetic construct
PQPVQSHPPIIAATP

SEQ ID NO: 35962 - protein, 15 aa, synthetic construct
KFKRMLNRELTHLSE

SEQ ID NO: 35963 - protein, 15 aa, synthetic construct
SGIIASKDTAPSIIV

SEQ ID NO: 35964 - protein, 15 aa, synthetic construct
ELAIYKQTESDYSYY

SEQ ID NO: 35965 - protein, 15 aa, synthetic construct
LAIYKQTESDYSYYN

SEQ ID NO: 35966 - protein, 15 aa, synthetic construct
DRENYDIIKTYHYLY

SEQ ID NO: 35967 - protein, 15 aa, synthetic construct
KAFKWFSTLTRHKRI

SEQ ID NO: 35968 - protein, 15 aa, synthetic construct
VVLKREDVFKAVQVQ

SEQ ID NO: 35969 - protein, 15 aa, synthetic construct
GDFVVLKREDVFKAV

SEQ ID NO: 35970 - protein, 15 aa, synthetic construct
TAPSIIVASGNIGSE

SEQ ID NO: 35971 - protein, 15 aa, synthetic construct
EQAFLRTVQALLSNS

SEQ ID NO: 35972 - protein, 15 aa, synthetic construct
IDSLIGSPPQPSPGH

SEQ ID NO: 35973 - protein, 15 aa, synthetic construct
EEQPRFQSAASRAQI

SEQ ID NO: 35974 - protein, 15 aa, synthetic construct
NPLELQSLDVGNVTA

SEQ ID NO: 35975 - protein, 15 aa, synthetic construct
SGHRQLLSVAATPAA

SEQ ID NO: 35976 - protein, 15 aa, synthetic construct
RKVLVWQNLDSPRAI

SEQ ID NO: 35977 - protein, 15 aa, synthetic construct
QAFLRTVQALLSNSS

SEQ ID NO: 35978 - protein, 15 aa, synthetic construct
QTRHSVSEMASNKFK

SEQ ID NO: 35979 - protein, 15 aa, synthetic construct
IAVLSGLIVPEIRGN

SEQ ID NO: 35980 - protein, 15 aa, synthetic construct
SEQAFLRTVQALLSN

SEQ ID NO: 35981 - protein, 15 aa, synthetic construct
EQPRFQSAASRAQIL

SEQ ID NO: 35982 - protein, 15 aa, synthetic construct
PRFQSAASRAQILDK

SEQ ID NO: 35983 - protein, 15 aa, synthetic construct
RQIAAVMSRAQGLPK

SEQ ID NO: 35984 - protein, 15 aa, synthetic construct
PYTSGIIASKDTAPS

SEQ ID NO: 35985 - protein, 15 aa, synthetic construct
YTSGIIASKDTAPSI

SEQ ID NO: 35986 - protein, 15 aa, synthetic construct
GKAFKWFSTLTRHKR

SEQ ID NO: 35987 - protein, 15 aa, synthetic construct
GGLQIAPVFIQDAGN

SEQ ID NO: 35988 - protein, 15 aa, synthetic construct
DTAPSIIVASGNIGS

SEQ ID NO: 35989 - protein, 15 aa, synthetic construct
QPRFQSAASRAQILD

SEQ ID NO: 35990 - protein, 15 aa, synthetic construct
RRQIAAVMSRAQGLP

SEQ ID NO: 35991 - protein, 15 aa, synthetic construct
FVVLKREDVFKAVQV

SEQ ID NO: 35992 - protein, 15 aa, synthetic construct
GSMRKVLVWQNLDSP

SEQ ID NO: 35993 - protein, 15 aa, synthetic construct
PEALSPAFSEDSESH

SEQ ID NO: 35994 - protein, 15 aa, synthetic construct
SDGYYRGEGTQDEEE

SEQ ID NO: 35995 - protein, 15 aa, synthetic construct
GGVSYRPAEVAETGA

SEQ ID NO: 35996 - protein, 15 aa, synthetic construct
LESGGLQIAPVFIQD

SEQ ID NO: 35997 - protein, 15 aa, synthetic construct
SVPSLQGEKASRAQI

SEQ ID NO: 35998 - protein, 15 aa, synthetic construct
GHRQLLSVAATPAAL

SEQ ID NO: 35999 - protein, 15 aa, synthetic construct
LNPLELQSLDVGNVT

SEQ ID NO: 36000 - protein, 15 aa, synthetic construct
DFVVLKREDVFKAVQ

SEQ ID NO: 36001 - protein, 15 aa, synthetic construct
WMKAIVSSGTLGDRM

SEQ ID NO: 36002 - protein, 15 aa, synthetic construct
ERRQIAAVMSRAQGL

SEQ ID NO: 36003 - protein, 15 aa, synthetic construct
RSLLVLNSTSFLYYP

SEQ ID NO: 36004 - protein, 15 aa, synthetic construct
YYNLILKKAGQFLDN

SEQ ID NO: 36005 - protein, 15 aa, synthetic construct
RENYDIIKTYHYLYL

SEQ ID NO: 36006 - protein, 15 aa, synthetic construct
KTADGKGEKRASELA

SEQ ID NO: 36007 - protein, 15 aa, synthetic construct
KVLYKSKTGKYSFPH

SEQ ID NO: 36008 - protein, 15 aa, synthetic construct
SRAQILDKATEYIQY

SEQ ID NO: 36009 - protein, 15 aa, synthetic construct
ADVSLHRNPATLKLW

SEQ ID NO: 36010 - protein, 15 aa, synthetic construct
SLLVLNSTSFLYYPD

SEQ ID NO: 36011 - protein, 15 aa, synthetic construct
PKVLYKSKTGKYSFP

SEQ ID NO: 36012 - protein, 15 aa, synthetic construct
PPYLRTEFHQHQHQH

SEQ ID NO: 36013 - protein, 15 aa, synthetic construct
KWFSTLTRHKRIHTG

SEQ ID NO: 36014 - protein, 15 aa, synthetic construct
SENDLVRSPKSAGSR

SEQ ID NO: 36015 - protein, 15 aa, synthetic construct
MADVSLHRNPATLKL

SEQ ID NO: 36016 - protein, 15 aa, synthetic construct
FKWFSTLTRHKRIHT

SEQ ID NO: 36017 - protein, 15 aa, synthetic construct
NVRSLLVLNSTSFLY

SEQ ID NO: 36018 - protein, 15 aa, synthetic construct
DYSYYNLILKKAGQF

SEQ ID NO: 36019 - protein, 15 aa, synthetic construct
AFKWFSTLTRHKRIH

SEQ ID NO: 36020 - protein, 15 aa, synthetic construct
ENYDIIKTYHYLYLA

SEQ ID NO: 36021 - protein, 15 aa, synthetic construct
IPKVLYKSKTGKYSF

SEQ ID NO: 36022 - protein, 15 aa, synthetic construct
LGIPKVLYKSKTGKY

SEQ ID NO: 36023 - protein, 15 aa, synthetic construct
YSYYNLILKKAGQFL

SEQ ID NO: 36024 - protein, 15 aa, synthetic construct
EPNGLILFSHGKPRH

SEQ ID NO: 36025 - protein, 15 aa, synthetic construct
GIPKVLYKSKTGKYS

SEQ ID NO: 36026 - protein, 15 aa, synthetic construct
RFVETLVVADKMMVG

SEQ ID NO: 36027 - protein, 15 aa, synthetic construct
NDRENYDIIKTYHYL

SEQ ID NO: 36028 - protein, 15 aa, synthetic construct
TADGKGEKRASELAK

SEQ ID NO: 36029 - protein, 15 aa, synthetic construct
FVETLVVADKMMVGY

SEQ ID NO: 36030 - protein, 15 aa, synthetic construct
DVSLHRNPATLKLWN

SEQ ID NO: 36031 - protein, 15 aa, synthetic construct
VLSGLIVPEIRGNET

SEQ ID NO: 36032 - protein, 15 aa, synthetic construct
VRSLLVLNSTSFLYY

SEQ ID NO: 36033 - protein, 15 aa, synthetic construct
GPPPYLRTEFHQHQH

SEQ ID NO: 36034 - protein, 15 aa, synthetic construct
YAPLIAVLSGLIVPE

SEQ ID NO: 36035 - protein, 15 aa, synthetic construct
NYDIIKTYHYLYLAM

SEQ ID NO: 36036 - protein, 15 aa, synthetic construct
DGDFVVLKREDVFKA

SEQ ID NO: 36037 - protein, 15 aa, synthetic construct
ENDLVRSPKSAGSRT

SEQ ID NO: 36038 - protein, 15 aa, synthetic construct
RDGDFVVLKREDVFK

SEQ ID NO: 36039 - protein, 15 aa, synthetic construct
EKSVVGSGSWQRVNA

SEQ ID NO: 36040 - protein, 15 aa, synthetic construct
PAPQPVQSHPPIIAA

SEQ ID NO: 36041 - protein, 15 aa, synthetic construct
SGSWQRVNAQTAVRS

SEQ ID NO: 36042 - protein, 15 aa, synthetic construct
TGSISFDFRTTEPNG

SEQ ID NO: 36043 - protein, 15 aa, synthetic construct
SGLIVPEIRGNETVP

SEQ ID NO: 36044 - protein, 15 aa, synthetic construct
SSENDLVRSPKSAGS

SEQ ID NO: 36045 - protein, 15 aa, synthetic construct
NDLVRSPKSAGSRTS

SEQ ID NO: 36046 - protein, 15 aa, synthetic construct
APQPVQSHPPIIAAT

SEQ ID NO: 36047 - protein, 15 aa, synthetic construct
LSGLIVPEIRGNETV

SEQ ID NO: 36048 - protein, 15 aa, synthetic construct
SYYNLILKKAGQFLD

SEQ ID NO: 36049 - protein, 15 aa, synthetic construct
EPLGTGTVSAELSSP

SEQ ID NO: 36050 - protein, 15 aa, synthetic construct
ENPYTSGIIASKDTA

SEQ ID NO: 36051 - protein, 15 aa, synthetic construct
EEEAQLEEIEETGGE

SEQ ID NO: 36052 - protein, 15 aa, synthetic construct
PLSAVSFAYAAGAGQ

SEQ ID NO: 36053 - protein, 15 aa, synthetic construct
GDVQHFDSSKIMEEH

SEQ ID NO: 36054 - protein, 15 aa, synthetic construct
DIDTFTSLNPLELQS

SEQ ID NO: 36055 - protein, 15 aa, synthetic construct
KGGVSYRPAEVAETG

SEQ ID NO: 36056 - protein, 15 aa, synthetic construct
GVGDVQHFDSSKIME

SEQ ID NO: 36057 - protein, 15 aa, synthetic construct
ALQALKGSQDSSEND

SEQ ID NO: 36058 - protein, 15 aa, synthetic construct
GYYRGEGTQDEEEGG

SEQ ID NO: 36059 - protein, 15 aa, synthetic construct
YYRGEGTQDEEEGGA

SEQ ID NO: 36060 - protein, 15 aa, synthetic construct
RQHRRGTKGGVSYRP

SEQ ID NO: 36061 - protein, 15 aa, synthetic construct
NSVSAVSIEEGAFRD

SEQ ID NO: 36062 - protein, 15 aa, synthetic construct
PSDGYYRGEGTQDEE

SEQ ID NO: 36063 - protein, 15 aa, synthetic construct
DEEQPRFQSAASRAQ

SEQ ID NO: 36064 - protein, 15 aa, synthetic construct
GSWQRVNAQTAVRSP

SEQ ID NO: 36065 - protein, 15 aa, synthetic construct
SLQGEKASRAQILDK

SEQ ID NO: 36066 - protein, 15 aa, synthetic construct
SGGFDALDLDDDSHE

SEQ ID NO: 36067 - protein, 15 aa, synthetic construct
GSGSWQRVNAQTAVR

SEQ ID NO: 36068 - protein, 15 aa, synthetic construct
NPYTSGIIASKDTAP

SEQ ID NO: 36069 - protein, 15 aa, synthetic construct
SIDSLIGSPPQPSPG

SEQ ID NO: 36070 - protein, 15 aa, synthetic construct
EEAQLEEIEETGGEG

SEQ ID NO: 36071 - protein, 15 aa, synthetic construct
LQGEKASRAQILDKA

SEQ ID NO: 36072 - protein, 15 aa, synthetic construct
TKGGVSYRPAEVAET

SEQ ID NO: 36073 - protein, 15 aa, synthetic construct
LQALKGSQDSSENDL

SEQ ID NO: 36074 - protein, 15 aa, synthetic construct
LIAVLSGLIVPEIRG

SEQ ID NO: 36075 - protein, 15 aa, synthetic construct
SSSNSSGDALVTRIS

SEQ ID NO: 36076 - protein, 15 aa, synthetic construct
GGFDALDLDDDSHER

SEQ ID NO: 36077 - protein, 15 aa, synthetic construct
SSSSNSSGDALVTRI

SEQ ID NO: 36078 - protein, 15 aa, synthetic construct
LNSTSFLYYPDPVLE

SEQ ID NO: 36079 - protein, 15 aa, synthetic construct
RFQSAASRAQILDKA

SEQ ID NO: 36080 - protein, 15 aa, synthetic construct
GSSSSNSSGDALVTR

SEQ ID NO: 36081 - protein, 15 aa, synthetic construct
LLVLNSTSFLYYPDP

SEQ ID NO: 36082 - protein, 15 aa, synthetic construct
LVLNSTSFLYYPDPV

SEQ ID NO: 36083 - protein, 15 aa, synthetic construct
QALKGSQDSSENDLV

SEQ ID NO: 36084 - protein, 15 aa, synthetic construct
DVQHFDSSKIMEEHS

SEQ ID NO: 36085 - protein, 15 aa, synthetic construct
VLNSTSFLYYPDPVL

SEQ ID NO: 36086 - protein, 15 aa, synthetic construct
SGSSSSNSSGDALVT

SEQ ID NO: 36087 - protein, 15 aa, synthetic construct
EDNDSGGFDALDLDD

SEQ ID NO: 36088 - protein, 15 aa, synthetic construct
NDSGGFDALDLDDDS

SEQ ID NO: 36089 - protein, 15 aa, synthetic construct
DNDSGGFDALDLDDD

SEQ ID NO: 36090 - protein, 15 aa, synthetic construct
VGSGSWQRVNAQTAV

SEQ ID NO: 36091 - protein, 15 aa, synthetic construct
VFSVVGMDSDWLMGE

SEQ ID NO: 36092 - protein, 15 aa, synthetic construct
TVFSVVGMDSDWLMG

SEQ ID NO: 36093 - protein, 15 aa, synthetic construct
IEETGGEGLQEEGVQ

SEQ ID NO: 36094 - protein, 15 aa, synthetic construct
SVSAVSIEEGAFRDS

SEQ ID NO: 36095 - protein, 15 aa, synthetic construct
FQSAASRAQILDKAT

SEQ ID NO: 36096 - protein, 15 aa, synthetic construct
EEIEETGGEGLQEEG

SEQ ID NO: 36097 - protein, 15 aa, synthetic construct
PLGTGTVSAELSSPW

SEQ ID NO: 36098 - protein, 15 aa, synthetic construct
SEPLGTGTVSAELSS

SEQ ID NO: 36099 - protein, 15 aa, synthetic construct
SMDIDTFTSLNPLEL

SEQ ID NO: 36100 - protein, 15 aa, synthetic construct
DSGGFDALDLDDDSH

SEQ ID NO: 36101 - protein, 15 aa, synthetic construct
ITVFSVVGMDSDWLM

SEQ ID NO: 36102 - protein, 15 aa, synthetic construct
EIEETGGEGLQEEGV

SEQ ID NO: 36103 - protein, 15 aa, synthetic construct
SEDSESHGSSSASSP

SEQ ID NO: 36104 - protein, 15 aa, synthetic construct
GGEGLQEEGVQLEEV

SEQ ID NO: 36105 - protein, 15 aa, synthetic construct
VQHFDSSKIMEEHSY

SEQ ID NO: 36106 - protein, 15 aa, synthetic construct
LGTGTVSAELSSPWA

SEQ ID NO: 36107 - protein, 15 aa, synthetic construct
DEVITVFSVVGMDSD

SEQ ID NO: 36108 - protein, 15 aa, synthetic construct
TSEPLGTGTVSAELS

SEQ ID NO: 36109 - protein, 15 aa, synthetic construct
GFDALDLDDDSHERY

SEQ ID NO: 36110 - protein, 15 aa, synthetic construct
SVVGMDSDWLMGERG

SEQ ID NO: 36111 - protein, 15 aa, synthetic construct
FSVVGMDSDWLMGER

SEQ ID NO: 36112 - protein, 15 aa, synthetic construct
VVGSGSWQRVNAQTA

SEQ ID NO: 36113 - protein, 15 aa, synthetic construct
EDSESHGSSSASSPL

SEQ ID NO: 36114 - protein, 15 aa, synthetic construct
IDTFTSLNPLELQSL

SEQ ID NO: 36115 - protein, 15 aa, synthetic construct
DSESHGSSSASSPLS

SEQ ID NO: 36116 - protein, 15 aa, synthetic construct
QQEEEAQLEEIEETG

SEQ ID NO: 36117 - protein, 15 aa, synthetic construct
QEEEAQLEEIEETGG

SEQ ID NO: 36118 - protein, 15 aa, synthetic construct
LQIAPVFIQDAGNYT

SEQ ID NO: 36119 - protein, 15 aa, synthetic construct
MDIDTFTSLNPLELQ

SEQ ID NO: 36120 - protein, 15 aa, synthetic construct
DTFTSLNPLELQSLD

SEQ ID NO: 36121 - protein, 15 aa, synthetic construct
SWQRVNAQTAVRSPR

SEQ ID NO: 36122 - protein, 15 aa, synthetic construct
SAVSFAYAAGAGQLR

SEQ ID NO: 36123 - protein, 15 aa, synthetic construct
MQRPLGSSTAFSIDS

SEQ ID NO: 36124 - protein, 15 aa, synthetic construct
SISFDFRTTEPNGLI

SEQ ID NO: 36125 - protein, 15 aa, synthetic construct
PSLQGEKASRAQILD

SEQ ID NO: 36126 - protein, 15 aa, synthetic construct
AVSFAYAAGAGQLRA

SEQ ID NO: 36127 - protein, 15 aa, synthetic construct
LSAVSFAYAAGAGQL

SEQ ID NO: 36128 - protein, 15 aa, synthetic construct
SFDFRTTEPNGLILF

SEQ ID NO: 36129 - protein, 15 aa, synthetic construct
QELAIYKQTESDYSY

SEQ ID NO: 36130 - protein, 15 aa, synthetic construct
GSISFDFRTTEPNGL

SEQ ID NO: 36131 - protein, 15 aa, synthetic construct
FSIDSLIGSPPQPSP

SEQ ID NO: 36132 - protein, 15 aa, synthetic construct
APPPLQTASAPLTTP

SEQ ID NO: 36133 - protein, 15 aa, synthetic construct
DGVGDVQHFDSSKIM

SEQ ID NO: 36134 - protein, 15 aa, synthetic construct
QGEKASRAQILDKAT

SEQ ID NO: 36135 - protein, 15 aa, synthetic construct
WQRVNAQTAVRSPRY

SEQ ID NO: 36136 - protein, 15 aa, synthetic construct
ISFDFRTTEPNGLIL

SEQ ID NO: 36137 - protein, 10 aa, synthetic construct
IPREDKNNFL

SEQ ID NO: 36138 - protein, 10 aa, synthetic construct
ILNETGKILL

SEQ ID NO: 36139 - protein, 9 aa, synthetic construct
NMFINLPRV

SEQ ID NO: 36140 - protein, 9 aa, synthetic construct
LLLAALEGL

SEQ ID NO: 36141 - protein, 9 aa, synthetic construct
LFVKDIYFL

SEQ ID NO: 36142 - protein, 9 aa, synthetic construct
LVGSNITFA

SEQ ID NO: 36143 - protein, 9 aa, synthetic construct
LVAQVVAEM

SEQ ID NO: 36144 - protein, 9 aa, synthetic construct
IVLSAPEGL

SEQ ID NO: 36145 - protein, 11 aa, synthetic construct
TQSELPTSFAV

SEQ ID NO: 36146 - protein, 9 aa, synthetic construct
HLEQPQQQL

SEQ ID NO: 36147 - protein, 9 aa, synthetic construct
IHFHAESFL

SEQ ID NO: 36148 - protein, 9 aa, synthetic construct
RMLDDYEEI

SEQ ID NO: 36149 - protein, 9 aa, synthetic construct
FMQGYPSKV

SEQ ID NO: 36150 - protein, 10 aa, synthetic construct
RITPGAFRNL

SEQ ID NO: 36151 - protein, 9 aa, synthetic construct
NLPRVKELL

SEQ ID NO: 36152 - protein, 10 aa, synthetic construct
GLGDRWFLRV

SEQ ID NO: 36153 - protein, 11 aa, synthetic construct
RVRMLDDYEEI

SEQ ID NO: 36154 - protein, 9 aa, synthetic construct
VKKTMPFFL

SEQ ID NO: 36155 - protein, 9 aa, synthetic construct
SELEHLSEL

SEQ ID NO: 36156 - protein, 11 aa, synthetic construct
FMQGYPSKVHI

SEQ ID NO: 36157 - protein, 10 aa, synthetic construct
YALHDVSDKI

SEQ ID NO: 36158 - protein, 11 aa, synthetic construct
KDLLLAALEGL

SEQ ID NO: 36159 - protein, 9 aa, synthetic construct
KLEEGQKNI

SEQ ID NO: 36160 - protein, 10 aa, synthetic construct
SNMFINLPRV

SEQ ID NO: 36161 - protein, 11 aa, synthetic construct
VQSELEHLSEL

SEQ ID NO: 36162 - protein, 9 aa, synthetic construct
SIEEAVPAV

SEQ ID NO: 36163 - protein, 8 aa, synthetic construct
FLYSKLTV

SEQ ID NO: 36164 - protein, 9 aa, synthetic construct
ALDQETSSL

SEQ ID NO: 36165 - protein, 10 aa, synthetic construct
KLDDDSERKV

SEQ ID NO: 36166 - protein, 11 aa, synthetic construct
FNLFVKDIYFL

SEQ ID NO: 36167 - protein, 9 aa, synthetic construct
ITPGAFRNL

SEQ ID NO: 36168 - protein, 9 aa, synthetic construct
YMARTPHWA

SEQ ID NO: 36169 - protein, 9 aa, synthetic construct
RLPLAVHSA

SEQ ID NO: 36170 - protein, 10 aa, synthetic construct
ALDQETSSLL

SEQ ID NO: 36171 - protein, 9 aa, synthetic construct
IFPDSEQRL

SEQ ID NO: 36172 - protein, 9 aa, synthetic construct
LLGGFSLAL

SEQ ID NO: 36173 - protein, 9 aa, synthetic construct
VIPVFNLFV

SEQ ID NO: 36174 - protein, 11 aa, synthetic construct
KLAKGTVQTGM

SEQ ID NO: 36175 - protein, 10 aa, synthetic construct
NLFVKDIYFL

SEQ ID NO: 36176 - protein, 11 aa, synthetic construct
FLSDSNMFINL

SEQ ID NO: 36177 - protein, 9 aa, synthetic construct
GMDTTKTVL

SEQ ID NO: 36178 - protein, 9 aa, synthetic construct
IVIPVFNLF

SEQ ID NO: 36179 - protein, 9 aa, synthetic construct
LLLGGFSLA

SEQ ID NO: 36180 - protein, 9 aa, synthetic construct
KVVKMILKL

SEQ ID NO: 36181 - protein, 11 aa, synthetic construct
KLEEGQKNIRL

SEQ ID NO: 36182 - protein, 11 aa, synthetic construct
TLQPGMRVRML

SEQ ID NO: 36183 - protein, 9 aa, synthetic construct
LMGNIIIEL

SEQ ID NO: 36184 - protein, 11 aa, synthetic construct
ALHDVSDKIPM

SEQ ID NO: 36185 - protein, 10 aa, synthetic construct
LLLGGFSLAL

SEQ ID NO: 36186 - protein, 10 aa, synthetic construct
LLLLGGFSLA

SEQ ID NO: 36187 - protein, 11 aa, synthetic construct
ALVGSNITFAV

SEQ ID NO: 36188 - protein, 10 aa, synthetic construct
ALVGSNITFA

SEQ ID NO: 36189 - protein, 9 aa, synthetic construct
AVENYLIQM

SEQ ID NO: 36190 - protein, 11 aa, synthetic construct
GLPPPYPLSQL

SEQ ID NO: 36191 - protein, 9 aa, synthetic construct
ALHDVSDKI

SEQ ID NO: 36192 - protein, 10 aa, synthetic construct
YMARTPHWAL

SEQ ID NO: 36193 - protein, 10 aa, synthetic construct
GLMGNIIIEL

SEQ ID NO: 36194 - protein, 9 aa, synthetic construct
RLLKKLFSG

SEQ ID NO: 36195 - protein, 11 aa, synthetic construct
KLDDDSERKVV

SEQ ID NO: 36196 - protein, 9 aa, synthetic construct
RLATGLDGM

SEQ ID NO: 36197 - protein, 10 aa, synthetic construct
MVYEGNARDI

SEQ ID NO: 36198 - protein, 9 aa, synthetic construct
GSNGEVPKV

SEQ ID NO: 36199 - protein, 10 aa, synthetic construct
LFSGYNKWSR

SEQ ID NO: 36200 - protein, 11 aa, synthetic construct
RDIIKGEAETR

SEQ ID NO: 36201 - protein, 9 aa, synthetic construct
QFMQGYPSK

SEQ ID NO: 36202 - protein, 9 aa, synthetic construct
PMNDHNAYR

SEQ ID NO: 36203 - protein, 10 aa, synthetic construct
REKASSSGKR

SEQ ID NO: 36204 - protein, 11 aa, synthetic construct
ITPDTKALLER

SEQ ID NO: 36205 - protein, 10 aa, synthetic construct
MGLGFTSSMR

SEQ ID NO: 36206 - protein, 10 aa, synthetic construct
KIYTEEKPYK

SEQ ID NO: 36207 - protein, 11 aa, synthetic construct
KSRKLTLPHSK

SEQ ID NO: 36208 - protein, 11 aa, synthetic construct
KGSGKLPGTSR

SEQ ID NO: 36209 - protein, 10 aa, synthetic construct
TFSAKDYMAR

SEQ ID NO: 36210 - protein, 8 aa, synthetic construct
SGYNKWSR

SEQ ID NO: 36211 - protein, 11 aa, synthetic construct
KANENDAIPIR

SEQ ID NO: 36212 - protein, 11 aa, synthetic construct
PSQLDKPRLNR

SEQ ID NO: 36213 - protein, 9 aa, synthetic construct
IYTEEKPYK

SEQ ID NO: 36214 - protein, 9 aa, synthetic construct
KEFSGPPAR

SEQ ID NO: 36215 - protein, 9 aa, synthetic construct
IIKGEAETR

SEQ ID NO: 36216 - protein, 10 aa, synthetic construct
TFAVNLIFPR

SEQ ID NO: 36217 - protein, 10 aa, synthetic construct
IPMNDHNAYR

SEQ ID NO: 36218 - protein, 9 aa, synthetic construct
SGKLPGTSR

SEQ ID NO: 36219 - protein, 10 aa, synthetic construct
YSKLTVDKSR

SEQ ID NO: 36220 - protein, 9 aa, synthetic construct
ETGKILLEK

SEQ ID NO: 36221 - protein, 9 aa, synthetic construct
SFQPETDNR

SEQ ID NO: 36222 - protein, 11 aa, synthetic construct
YFKGEFPPYPK

SEQ ID NO: 36223 - protein, 11 aa, synthetic construct
LVAQVVAEMWR

SEQ ID NO: 36224 - protein, 10 aa, synthetic construct
AAPSQLDKPR

SEQ ID NO: 36225 - protein, 11 aa, synthetic construct
LLKIFPDSEQR

SEQ ID NO: 36226 - protein, 9 aa, synthetic construct
AVPAVCKTR

SEQ ID NO: 36227 - protein, 10 aa, synthetic construct
AYVPMAVGSW

SEQ ID NO: 36228 - protein, 9 aa, synthetic construct
ENYLIQMAR

SEQ ID NO: 36229 - protein, 10 aa, synthetic construct
GSGKLPGTSR

SEQ ID NO: 36230 - protein, 9 aa, synthetic construct
APSQLDKPR

SEQ ID NO: 36231 - protein, 11 aa, synthetic construct
KTFSAKDYMAR

SEQ ID NO: 36232 - protein, 9 aa, synthetic construct
SRITPGAFR

SEQ ID NO: 36233 - protein, 10 aa, synthetic construct
ALHRSGQIER

SEQ ID NO: 36234 - protein, 10 aa, synthetic construct
FVKDIYFLHK

SEQ ID NO: 36235 - protein, 10 aa, synthetic construct
HFHAESFLYR

SEQ ID NO: 36236 - protein, 9 aa, synthetic construct
MFINLPRVK

SEQ ID NO: 36237 - protein, 11 aa, synthetic construct
VVHKPSAVPSR

SEQ ID NO: 36238 - protein, 10 aa, synthetic construct
LGFEKGEQLR

SEQ ID NO: 36239 - protein, 11 aa, synthetic construct
IHFHAESFLYR

SEQ ID NO: 36240 - protein, 11 aa, synthetic construct
SNSSHLIGHGR

SEQ ID NO: 36241 - protein, 9 aa, synthetic construct
SNMFINLPR

SEQ ID NO: 36242 - protein, 9 aa, synthetic construct
FAVNLIFPR

SEQ ID NO: 36243 - protein, 10 aa, synthetic construct
VSFQPETDNR

SEQ ID NO: 36244 - protein, 9 aa, synthetic construct
RWFLRVEDR

SEQ ID NO: 36245 - protein, 9 aa, synthetic construct
KIFPDSEQR

SEQ ID NO: 36246 - protein, 8 aa, synthetic construct
RITPGAFR

SEQ ID NO: 36247 - protein, 9 aa, synthetic construct
SSHLIGHGR

SEQ ID NO: 36248 - protein, 10 aa, synthetic construct
TSREIQTAVR

SEQ ID NO: 36249 - protein, 10 aa, synthetic construct
QTGPVPPGRL

SEQ ID NO: 36250 - protein, 9 aa, synthetic construct
GLGDRWFLR

SEQ ID NO: 36251 - protein, 9 aa, synthetic construct
AAQNASLLK

SEQ ID NO: 36252 - protein, 8 aa, synthetic construct
AVNLIFPR

SEQ ID NO: 36253 - protein, 10 aa, synthetic construct
VHKPSAVPSR

SEQ ID NO: 36254 - protein, 9 aa, synthetic construct
KGKSYNFNK

SEQ ID NO: 36255 - protein, 9 aa, synthetic construct
HSATPLPRR

SEQ ID NO: 36256 - protein, 10 aa, synthetic construct
YGLGDRWFLR

SEQ ID NO: 36257 - protein, 11 aa, synthetic construct
LYSKLTVDKSR

SEQ ID NO: 36258 - protein, 11 aa, synthetic construct
AVENYLIQMAR

SEQ ID NO: 36259 - protein, 11 aa, synthetic construct
KLFSGYNKWSR

SEQ ID NO: 36260 - protein, 11 aa, synthetic construct
ITFAVNLIFPR

SEQ ID NO: 36261 - protein, 9 aa, synthetic construct
FSAKDYMAR

SEQ ID NO: 36262 - protein, 9 aa, synthetic construct
GFEKGEQLR

SEQ ID NO: 36263 - protein, 11 aa, synthetic construct
TMPPPQVSGSR

SEQ ID NO: 36264 - protein, 11 aa, synthetic construct
AVRLESTYQNR

SEQ ID NO: 36265 - protein, 9 aa, synthetic construct
FSGYNKWSR

SEQ ID NO: 36266 - protein, 8 aa, synthetic construct
SATPLPRR

SEQ ID NO: 36267 - protein, 9 aa, synthetic construct
FVKDIYFLH

SEQ ID NO: 36268 - protein, 11 aa, synthetic construct
LIPMNDHNAYR

SEQ ID NO: 36269 - protein, 9 aa, synthetic construct
KSRKLTLPH

SEQ ID NO: 36270 - protein, 9 aa, synthetic construct
RLFHGNYSR

SEQ ID NO: 36271 - protein, 10 aa, synthetic construct
LSRITPGAFR

SEQ ID NO: 36272 - protein, 11 aa, synthetic construct
GEARPSTPQRQ

SEQ ID NO: 36273 - protein, 9 aa, synthetic construct
ERKVVKMIL

SEQ ID NO: 36274 - protein, 11 aa, synthetic construct
SREIQTAVRLL

SEQ ID NO: 36275 - protein, 10 aa, synthetic construct
SREIQTAVRL

SEQ ID NO: 36276 - protein, 10 aa, synthetic construct
GLGAFEAAGF

SEQ ID NO: 36277 - protein, 11 aa, synthetic construct
HRILNETGKIL

SEQ ID NO: 36278 - protein, 11 aa, synthetic construct
QMARYGQLSEK

SEQ ID NO: 36279 - protein, 11 aa, synthetic construct
SWFAGIVNSAV

SEQ ID NO: 36280 - protein, 11 aa, synthetic construct
RRDDIEDGDSM

SEQ ID NO: 36281 - protein, 11 aa, synthetic construct
QRDCLTCQEKL

SEQ ID NO: 36282 - protein, 11 aa, synthetic construct
TRLATGLDGMR

SEQ ID NO: 36283 - protein, 10 aa, synthetic construct
KRSTITSREI

SEQ ID NO: 36284 - protein, 9 aa, synthetic construct
GKSYNFNKF

SEQ ID NO: 36285 - protein, 10 aa, synthetic construct
SGRLPLAVHS

SEQ ID NO: 36286 - protein, 10 aa, synthetic construct
MRVKKTMPFF

SEQ ID NO: 36287 - protein, 9 aa, synthetic construct
GRLAGPPAV

SEQ ID NO: 36288 - protein, 10 aa, synthetic construct
SRKLTLPHSK

SEQ ID NO: 36289 - protein, 10 aa, synthetic construct
RHRILNETGK

SEQ ID NO: 36290 - protein, 9 aa, synthetic construct
RKVVKMILK

SEQ ID NO: 36291 - protein, 9 aa, synthetic construct
IRSVAFPCI

SEQ ID NO: 36292 - protein, 11 aa, synthetic construct
HRKIYTEEKPY

SEQ ID NO: 36293 - protein, 9 aa, synthetic construct
MRVRMLDDY

SEQ ID NO: 36294 - protein, 10 aa, synthetic construct
MARYGQLSEK

SEQ ID NO: 36295 - protein, 11 aa, synthetic construct
KRKKVKMKREK

SEQ ID NO: 36296 - protein, 11 aa, synthetic construct
ERLLKKLFSGY

SEQ ID NO: 36297 - protein, 9 aa, synthetic construct
HQQGLPPPY

SEQ ID NO: 36298 - protein, 11 aa, synthetic construct
SRITPGAFRNL

SEQ ID NO: 36299 - protein, 9 aa, synthetic construct
GRLPLAVHS

SEQ ID NO: 36300 - protein, 11 aa, synthetic construct
ERKVVKMILKL

SEQ ID NO: 36301 - protein, 10 aa, synthetic construct
MARTPHWALF

SEQ ID NO: 36302 - protein, 11 aa, synthetic construct
LRHLEQPQQQL

SEQ ID NO: 36303 - protein, 9 aa, synthetic construct
SRGQAASSH

SEQ ID NO: 36304 - protein, 9 aa, synthetic construct
GLGGGLGNV

SEQ ID NO: 36305 - protein, 8 aa, synthetic construct
SRITPGAF

SEQ ID NO: 36306 - protein, 10 aa, synthetic construct
ERKVVKMILK

SEQ ID NO: 36307 - protein, 9 aa, synthetic construct
TQSELPTSF

SEQ ID NO: 36308 - protein, 9 aa, synthetic construct
QRQASNASK

SEQ ID NO: 36309 - protein, 10 aa, synthetic construct
GSWFAGIVNS

SEQ ID NO: 36310 - protein, 11 aa, synthetic construct
KREKASSSGKR

SEQ ID NO: 36311 - protein, 10 aa, synthetic construct
KREKASSSGK

SEQ ID NO: 36312 - protein, 10 aa, synthetic construct
SWFAGIVNSA

SEQ ID NO: 36313 - protein, 10 aa, synthetic construct
GRLPLAVHSA

SEQ ID NO: 36314 - protein, 11 aa, synthetic construct
GRLPLAVHSAQ

SEQ ID NO: 36315 - protein, 10 aa, synthetic construct
RLAGPPAVAT

SEQ ID NO: 36316 - protein, 10 aa, synthetic construct
GLGGGLGNVL

SEQ ID NO: 36317 - protein, 9 aa, synthetic construct
ARTPHWALF

SEQ ID NO: 36318 - protein, 8 aa, synthetic construct
ARTPHWAL

SEQ ID NO: 36319 - protein, 10 aa, synthetic construct
RKEFSGPPAR

SEQ ID NO: 36320 - protein, 9 aa, synthetic construct
ARPSTPQRQ

SEQ ID NO: 36321 - protein, 9 aa, synthetic construct
RLAGPPAVA

SEQ ID NO: 36322 - protein, 8 aa, synthetic construct
RLAGPPAV

SEQ ID NO: 36323 - protein, 11 aa, synthetic construct
LRVEDRQDLNR

SEQ ID NO: 36324 - protein, 11 aa, synthetic construct
IRKEFSGPPAR

SEQ ID NO: 36325 - protein, 10 aa, synthetic construct
SERKVVKMIL

SEQ ID NO: 36326 - protein, 9 aa, synthetic construct
MRKRESQSV

SEQ ID NO: 36327 - protein, 9 aa, synthetic construct
RKLTLPHSK

SEQ ID NO: 36328 - protein, 9 aa, synthetic construct
HRILNETGK

SEQ ID NO: 36329 - protein, 11 aa, synthetic construct
IRLAVRLESTY

SEQ ID NO: 36330 - protein, 11 aa, synthetic construct
ERKTKRPSLRL

SEQ ID NO: 36331 - protein, 9 aa, synthetic construct
MRVKKTMPF

SEQ ID NO: 36332 - protein, 9 aa, synthetic construct
HRKIYTEEK

SEQ ID NO: 36333 - protein, 9 aa, synthetic construct
SREIQTAVR

SEQ ID NO: 36334 - protein, 10 aa, synthetic construct
VRLESTYQNR

SEQ ID NO: 36335 - protein, 11 aa, synthetic construct
GLGAFEAAGFH

SEQ ID NO: 36336 - protein, 8 aa, synthetic construct
KRPSLRLF

SEQ ID NO: 36337 - protein, 9 aa, synthetic construct
LRVEDRQDL

SEQ ID NO: 36338 - protein, 9 aa, synthetic construct
SWFAGIVNS

SEQ ID NO: 36339 - protein, 11 aa, synthetic construct
YMARTPHWALF

SEQ ID NO: 36340 - protein, 9 aa, synthetic construct
QRQDLALSI

SEQ ID NO: 36341 - protein, 10 aa, synthetic construct
TRLATGLDGM

SEQ ID NO: 36342 - protein, 11 aa, synthetic construct
KRSIEEAVPAV

SEQ ID NO: 36343 - protein, 11 aa, synthetic construct
MRVKKTMPFFL

SEQ ID NO: 36344 - protein, 10 aa, synthetic construct
IEKNELSRIT

SEQ ID NO: 36345 - protein, 9 aa, synthetic construct
KENNIRSVA

SEQ ID NO: 36346 - protein, 8 aa, synthetic construct
YESHVVEW

SEQ ID NO: 36347 - protein, 10 aa, synthetic construct
QSELEHLSEL

SEQ ID NO: 36348 - protein, 9 aa, synthetic construct
SEKDIVHSG

SEQ ID NO: 36349 - protein, 10 aa, synthetic construct
VFEYDLISQF

SEQ ID NO: 36350 - protein, 10 aa, synthetic construct
KDIVHSGLAY

SEQ ID NO: 36351 - protein, 10 aa, synthetic construct
QCERLFHGNY

SEQ ID NO: 36352 - protein, 9 aa, synthetic construct
ENDAIPIRW

SEQ ID NO: 36353 - protein, 10 aa, synthetic construct
FEYDLISQFM

SEQ ID NO: 36354 - protein, 9 aa, synthetic construct
KEPKKPPVF

SEQ ID NO: 36355 - protein, 11 aa, synthetic construct
LELPQQQEGQL

SEQ ID NO: 36356 - protein, 10 aa, synthetic construct
KDYMARTPHW

SEQ ID NO: 36357 - protein, 10 aa, synthetic construct
QSELPTSFAV

SEQ ID NO: 36358 - protein, 11 aa, synthetic construct
FSEIVLSAPEG

SEQ ID NO: 36359 - protein, 8 aa, synthetic construct
VENYLIQM

SEQ ID NO: 36360 - protein, 9 aa, synthetic construct
QEDILDTGN

SEQ ID NO: 36361 - protein, 8 aa, synthetic construct
NDAIPIRW

SEQ ID NO: 36362 - protein, 10 aa, synthetic construct
TEYEVAQRPA

SEQ ID NO: 36363 - protein, 9 aa, synthetic construct
EETRLATGL

SEQ ID NO: 36364 - protein, 10 aa, synthetic construct
SKLTVDKSRW

SEQ ID NO: 36365 - protein, 9 aa, synthetic construct
REIQTAVRL

SEQ ID NO: 36366 - protein, 11 aa, synthetic construct
YEVAQRPAKAL

SEQ ID NO: 36367 - protein, 10 aa, synthetic construct
IKEPKKPPVF

SEQ ID NO: 36368 - protein, 11 aa, synthetic construct
EKDIVHSGLAY

SEQ ID NO: 36369 - protein, 9 aa, synthetic construct
AEVECQRQD

SEQ ID NO: 36370 - protein, 10 aa, synthetic construct
TESSSRGQAA

SEQ ID NO: 36371 - protein, 9 aa, synthetic construct
YDSNSPYEW

SEQ ID NO: 36372 - protein, 11 aa, synthetic construct
LEEGQKNIRLL

SEQ ID NO: 36373 - protein, 10 aa, synthetic construct
LEEGQKNIRL

SEQ ID NO: 36374 - protein, 11 aa, synthetic construct
ANENDAIPIRW

SEQ ID NO: 36375 - protein, 9 aa, synthetic construct
EIVLSAPEG

SEQ ID NO: 36376 - protein, 10 aa, synthetic construct
KENNIRSVAF

SEQ ID NO: 36377 - protein, 11 aa, synthetic construct
NELSRITPGAF

SEQ ID NO: 36378 - protein, 9 aa, synthetic construct
GEFPPYPKP

SEQ ID NO: 36379 - protein, 9 aa, synthetic construct
FEYDLISQF

SEQ ID NO: 36380 - protein, 11 aa, synthetic construct
RDTLQPGMRVR

SEQ ID NO: 36381 - protein, 11 aa, synthetic construct
SKAYGRMGLAL

SEQ ID NO: 36382 - protein, 11 aa, synthetic construct
VENYLIQMARY

SEQ ID NO: 36383 - protein, 10 aa, synthetic construct
SEIVLSAPEG

SEQ ID NO: 36384 - protein, 11 aa, synthetic construct
SEIVLSAPEGL

SEQ ID NO: 36385 - protein, 10 aa, synthetic construct
MNDHNAYRCF

SEQ ID NO: 36386 - protein, 9 aa, synthetic construct
SKAYGRMGL

SEQ ID NO: 36387 - protein, 11 aa, synthetic construct
ASEKDIVHSGL

SEQ ID NO: 36388 - protein, 11 aa, synthetic construct
AYSKAYGRMGL

SEQ ID NO: 36389 - protein, 9 aa, synthetic construct
QETSSLLRC

SEQ ID NO: 36390 - protein, 11 aa, synthetic construct
NGEVPKVPVTF

SEQ ID NO: 36391 - protein, 10 aa, synthetic construct
NENDAIPIRW

SEQ ID NO: 36392 - protein, 11 aa, synthetic construct
NENDAIPIRWM

SEQ ID NO: 36393 - protein, 11 aa, synthetic construct
QVFEYDLISQF

SEQ ID NO: 36394 - protein, 10 aa, synthetic construct
SDYHPCTETF

SEQ ID NO: 36395 - protein, 10 aa, synthetic construct
GDDRPESPEY

SEQ ID NO: 36396 - protein, 11 aa, synthetic construct
GEVPKVPVTFD

SEQ ID NO: 36397 - protein, 10 aa, synthetic construct
GEVPKVPVTF

SEQ ID NO: 36398 - protein, 10 aa, synthetic construct
SELPTSFAVI

SEQ ID NO: 36399 - protein, 10 aa, synthetic construct
RESQSVEEAL

SEQ ID NO: 36400 - protein, 9 aa, synthetic construct
CERLFHGNY

SEQ ID NO: 36401 - protein, 8 aa, synthetic construct
EYDLISQF

SEQ ID NO: 36402 - protein, 10 aa, synthetic construct
RPEDNIRLAV

SEQ ID NO: 36403 - protein, 10 aa, synthetic construct
QDVDLHTIHF

SEQ ID NO: 36404 - protein, 11 aa, synthetic construct
SEKDIVHSGLA

SEQ ID NO: 36405 - protein, 10 aa, synthetic construct
SEKDIVHSGL

SEQ ID NO: 36406 - protein, 9 aa, synthetic construct
RESQSVEEA

SEQ ID NO: 36407 - protein, 9 aa, synthetic construct
PEDNIRLAV

SEQ ID NO: 36408 - protein, 9 aa, synthetic construct
STHPKGKSY

SEQ ID NO: 36409 - protein, 9 aa, synthetic construct
KELARRDDI

SEQ ID NO: 36410 - protein, 9 aa, synthetic construct
NDHNAYRCF

SEQ ID NO: 36411 - protein, 9 aa, synthetic construct
SERKVVKMI

SEQ ID NO: 36412 - protein, 8 aa, synthetic construct
SERKVVKM

SEQ ID NO: 36413 - protein, 10 aa, synthetic construct
QELTQLKAAV

SEQ ID NO: 36414 - protein, 9 aa, synthetic construct
EEAVPAVCK

SEQ ID NO: 36415 - protein, 9 aa, synthetic construct
DDRPESPEY

SEQ ID NO: 36416 - protein, 9 aa, synthetic construct
TLQPGMRVR

SEQ ID NO: 36417 - protein, 9 aa, synthetic construct
EKDIVHSGL

SEQ ID NO: 36418 - protein, 8 aa, synthetic construct
LEQPQQQL

SEQ ID NO: 36419 - protein, 10 aa, synthetic construct
RDTKEALKEF

SEQ ID NO: 36420 - protein, 10 aa, synthetic construct
GEDRDTKEAL

SEQ ID NO: 36421 - protein, 9 aa, synthetic construct
SELPTSFAV

SEQ ID NO: 36422 - protein, 9 aa, synthetic construct
FEKGEQLRI

SEQ ID NO: 36423 - protein, 9 aa, synthetic construct
KLFSGYNKW

SEQ ID NO: 36424 - protein, 9 aa, synthetic construct
YEGNARDII

SEQ ID NO: 36425 - protein, 9 aa, synthetic construct
DYMARTPHW

SEQ ID NO: 36426 - protein, 9 aa, synthetic construct
TEYEVAQRP

SEQ ID NO: 36427 - protein, 10 aa, synthetic construct
AEVECQRQDL

SEQ ID NO: 36428 - protein, 9 aa, synthetic construct
QELTQLKAA

SEQ ID NO: 36429 - protein, 10 aa, synthetic construct
WDYESHVVEW

SEQ ID NO: 36430 - protein, 9 aa, synthetic construct
QGLPPPYPL

SEQ ID NO: 36431 - protein, 9 aa, synthetic construct
VAQRPAKAL

SEQ ID NO: 36432 - protein, 11 aa, synthetic construct
IFPDSEQRLKI

SEQ ID NO: 36433 - protein, 10 aa, synthetic construct
IFPDSEQRLK

SEQ ID NO: 36434 - protein, 8 aa, synthetic construct
TPGAFRNL

SEQ ID NO: 36435 - protein, 8 aa, synthetic construct
LPTSFAVI

SEQ ID NO: 36436 - protein, 11 aa, synthetic construct
QSELPTSFAVI

SEQ ID NO: 36437 - protein, 9 aa, synthetic construct
VYEGNARDI

SEQ ID NO: 36438 - protein, 9 aa, synthetic construct
TSREIQTAV

SEQ ID NO: 36439 - protein, 9 aa, synthetic construct
TITPDTKAL

SEQ ID NO: 36440 - protein, 10 aa, synthetic construct
TGMDTTKTVL

SEQ ID NO: 36441 - protein, 9 aa, synthetic construct
AFSNSSHLI

SEQ ID NO: 36442 - protein, 10 aa, synthetic construct
ITPDTKALLE

SEQ ID NO: 36443 - protein, 10 aa, synthetic construct
GVPLHSATPL

SEQ ID NO: 36444 - protein, 9 aa, synthetic construct
EVPKVPVTF

SEQ ID NO: 36445 - protein, 9 aa, synthetic construct
ELPTSFAVI

SEQ ID NO: 36446 - protein, 8 aa, synthetic construct
ELPTSFAV

SEQ ID NO: 36447 - protein, 11 aa, synthetic construct
LKIFPDSEQRL

SEQ ID NO: 36448 - protein, 9 aa, synthetic construct
AVAAVGSRL

SEQ ID NO: 36449 - protein, 9 aa, synthetic construct
INLPRVKEL

SEQ ID NO: 36450 - protein, 8 aa, synthetic construct
VAAVGSRL

SEQ ID NO: 36451 - protein, 8 aa, synthetic construct
GLPPPYPL

SEQ ID NO: 36452 - protein, 8 aa, synthetic construct
FPDSEQRL

SEQ ID NO: 36453 - protein, 9 aa, synthetic construct
VPLHSATPL

SEQ ID NO: 36454 - protein, 11 aa, synthetic construct
KIPTAHKQSHV

SEQ ID NO: 36455 - protein, 10 aa, synthetic construct
KIFPDSEQRL

SEQ ID NO: 36456 - protein, 11 aa, synthetic construct
KTITPDTKALL

SEQ ID NO: 36457 - protein, 10 aa, synthetic construct
YVPMAVGSWF

SEQ ID NO: 36458 - protein, 8 aa, synthetic construct
VVHKPSAV

SEQ ID NO: 36459 - protein, 9 aa, synthetic construct
LGFEKGEQL

SEQ ID NO: 36460 - protein, 9 aa, synthetic construct
TGMDTTKTV

SEQ ID NO: 36461 - protein, 8 aa, synthetic construct
FSNSSHLI

SEQ ID NO: 36462 - protein, 8 aa, synthetic construct
NLPRVKEL

SEQ ID NO: 36463 - protein, 10 aa, synthetic construct
TSPPPCWNSV

SEQ ID NO: 36464 - protein, 10 aa, synthetic construct
LQPGMRVRML

SEQ ID NO: 36465 - protein, 11 aa, synthetic construct
VIKEPKKPPVF

SEQ ID NO: 36466 - protein, 9 aa, synthetic construct
AAVGSRLYI

SEQ ID NO: 36467 - protein, 9 aa, synthetic construct
CAAQNASLL

SEQ ID NO: 36468 - protein, 11 aa, synthetic construct
GLPTTPAAPGL

SEQ ID NO: 36469 - protein, 9 aa, synthetic construct
ILNETGKIL

SEQ ID NO: 36470 - protein, 9 aa, synthetic construct
GAASEPVVL

SEQ ID NO: 36471 - protein, 9 aa, synthetic construct
TMPPPQVSG

SEQ ID NO: 36472 - protein, 8 aa, synthetic construct
TMPPPQVS

SEQ ID NO: 36473 - protein, 9 aa, synthetic construct
SPPPCWNSV

SEQ ID NO: 36474 - protein, 10 aa, synthetic construct
FINLPRVKEL

SEQ ID NO: 36475 - protein, 9 aa, synthetic construct
FVVHKPSAV

SEQ ID NO: 36476 - protein, 8 aa, synthetic construct
AASEPVVL

SEQ ID NO: 36477 - protein, 9 aa, synthetic construct
TSNARAVII

SEQ ID NO: 36478 - protein, 9 aa, synthetic construct
KVPVTFDDV

SEQ ID NO: 36479 - protein, 10 aa, synthetic construct
TITPDTKALL

SEQ ID NO: 36480 - protein, 9 aa, synthetic construct
SAPEGLPTT

SEQ ID NO: 36481 - protein, 11 aa, synthetic construct
FQPETDNRANF

SEQ ID NO: 36482 - protein, 9 aa, synthetic construct
MARTPHWAL

SEQ ID NO: 36483 - protein, 10 aa, synthetic construct
INLPRVKELL

SEQ ID NO: 36484 - protein, 9 aa, synthetic construct
ACAAQNASL

SEQ ID NO: 36485 - protein, 8 aa, synthetic construct
VIPVFNLF

SEQ ID NO: 36486 - protein, 9 aa, synthetic construct
KTKRPSLRL

SEQ ID NO: 36487 - protein, 10 aa, synthetic construct
LPPPYPLSQL

SEQ ID NO: 36488 - protein, 9 aa, synthetic construct
AFPCISTGI

SEQ ID NO: 36489 - protein, 8 aa, synthetic construct
ITPDTKAL

SEQ ID NO: 36490 - protein, 9 aa, synthetic construct
ITPDTKALL

SEQ ID NO: 36491 - protein, 9 aa, synthetic construct
LQPGMRVRM

SEQ ID NO: 36492 - protein, 10 aa, synthetic construct
RHLEQPQQQL

SEQ ID NO: 36493 - protein, 9 aa, synthetic construct
MSERQGAGA

SEQ ID NO: 36494 - protein, 8 aa, synthetic construct
LDQETSSL

SEQ ID NO: 36495 - protein, 8 aa, synthetic construct
GMDTTKTV

SEQ ID NO: 36496 - protein, 8 aa, synthetic construct
KGEFPPYP

SEQ ID NO: 36497 - protein, 9 aa, synthetic construct
ATGLDGMRI

SEQ ID NO: 36498 - protein, 9 aa, synthetic construct
LDDDSERKV

SEQ ID NO: 36499 - protein, 10 aa, synthetic construct
RSIEEAVPAV

SEQ ID NO: 36500 - protein, 9 aa, synthetic construct
DVDLHTIHF

SEQ ID NO: 36501 - protein, 11 aa, synthetic construct
YSDYHPCTETF

SEQ ID NO: 36502 - protein, 8 aa, synthetic construct
YDLISQFM

SEQ ID NO: 36503 - protein, 10 aa, synthetic construct
FPDSEQRLKI

SEQ ID NO: 36504 - protein, 9 aa, synthetic construct
MAAWGFCFA

SEQ ID NO: 36505 - protein, 11 aa, synthetic construct
QTGMDTTKTVL

SEQ ID NO: 36506 - protein, 9 aa, synthetic construct
YWDYESHVV

SEQ ID NO: 36507 - protein, 8 aa, synthetic construct
YSKAYGRM

SEQ ID NO: 36508 - protein, 11 aa, synthetic construct
PPALDQETSSL

SEQ ID NO: 36509 - protein, 9 aa, synthetic construct
EYDLISQFM

SEQ ID NO: 36510 - protein, 9 aa, synthetic construct
VAAVGSRLY

SEQ ID NO: 36511 - protein, 8 aa, synthetic construct
QSELPTSF

SEQ ID NO: 36512 - protein, 9 aa, synthetic construct
DIEDGDSMI

SEQ ID NO: 36513 - protein, 8 aa, synthetic construct
VDLHTIHF

SEQ ID NO: 36514 - protein, 10 aa, synthetic construct
LSDSNMFINL

SEQ ID NO: 36515 - protein, 9 aa, synthetic construct
CIDPAYSKA

SEQ ID NO: 36516 - protein, 11 aa, synthetic construct
DADAGIDGVIL

SEQ ID NO: 36517 - protein, 9 aa, synthetic construct
LGDRWFLRV

SEQ ID NO: 36518 - protein, 11 aa, synthetic construct
GQDVDLHTIHF

SEQ ID NO: 36519 - protein, 9 aa, synthetic construct
DADAGIDGV

SEQ ID NO: 36520 - protein, 10 aa, synthetic construct
LATGLDGMRI

SEQ ID NO: 36521 - protein, 8 aa, synthetic construct
MAAWGFCF

SEQ ID NO: 36522 - protein, 10 aa, synthetic construct
PALDQETSSL

SEQ ID NO: 36523 - protein, 15 aa, synthetic construct
TIVRKKALPDSGEDR

SEQ ID NO: 36524 - protein, 15 aa, synthetic construct
SELEHLSELRREAGK

SEQ ID NO: 36525 - protein, 15 aa, synthetic construct
TETFSYQSTFSVHQK

SEQ ID NO: 36526 - protein, 15 aa, synthetic construct
LLFNMLRHLEQPQQQ

SEQ ID NO: 36527 - protein, 15 aa, synthetic construct
KAVENYLIQMARYGQ

SEQ ID NO: 36528 - protein, 15 aa, synthetic construct
TSSIVIKEPKKPPVF

SEQ ID NO: 36529 - protein, 15 aa, synthetic construct
MYRGPVYALHDVSDK

SEQ ID NO: 36530 - protein, 15 aa, synthetic construct
NGFMRKRESQSVEEA

SEQ ID NO: 36531 - protein, 15 aa, synthetic construct
KLQEIYQELTQLKAA

SEQ ID NO: 36532 - protein, 15 aa, synthetic construct
GSFFLYSKLTVDKSR

SEQ ID NO: 36533 - protein, 15 aa, synthetic construct
TIDVDKKLEEGQKNI

SEQ ID NO: 36534 - protein, 15 aa, synthetic construct
AEFQWFKEETRLATG

SEQ ID NO: 36535 - protein, 15 aa, synthetic construct
LAHYNKRSTITSREI

SEQ ID NO: 36536 - protein, 15 aa, synthetic construct
SADYYKANENDAIPI

SEQ ID NO: 36537 - protein, 15 aa, synthetic construct
QEIYQELTQLKAAVG

SEQ ID NO: 36538 - protein, 15 aa, synthetic construct
LGDRWFLRVEDRQDL

SEQ ID NO: 36539 - protein, 15 aa, synthetic construct
DHNAYRCFSQPRHIS

SEQ ID NO: 36540 - protein, 15 aa, synthetic construct
YSADYYKANENDAIP

SEQ ID NO: 36541 - protein, 15 aa, synthetic construct
GSFGMVYEGNARDII

SEQ ID NO: 36542 - protein, 15 aa, synthetic construct
PTSFAVITEDATLSP

SEQ ID NO: 36543 - protein, 15 aa, synthetic construct
SAKPFTIDVDKKLEE

SEQ ID NO: 36544 - protein, 15 aa, synthetic construct
PKGKSYNFNKFGENK

SEQ ID NO: 36545 - protein, 15 aa, synthetic construct
LEHLSELRREAGKDR

SEQ ID NO: 36546 - protein, 15 aa, synthetic construct
KNAYVPMAVGSWFAG

SEQ ID NO: 36547 - protein, 15 aa, synthetic construct
FQWFKEETRLATGLD

SEQ ID NO: 36548 - protein, 15 aa, synthetic construct
CGCGWKGSGKLPGTS

SEQ ID NO: 36549 - protein, 15 aa, synthetic construct
NNVFVVHKPSAVPSR

SEQ ID NO: 36550 - protein, 15 aa, synthetic construct
EDNIRLAVRLESTYQ

SEQ ID NO: 36551 - protein, 15 aa, synthetic construct
VENYLIQMARYGQLS

SEQ ID NO: 36552 - protein, 15 aa, synthetic construct
SKLTVDKSRWQQGNV

SEQ ID NO: 36553 - protein, 15 aa, synthetic construct
TAEFQDRISGASEKD

SEQ ID NO: 36554 - protein, 15 aa, synthetic construct
FTIDVDKKLEEGQKN

SEQ ID NO: 36555 - protein, 15 aa, synthetic construct
GKAFSNSSHLIGHGR

SEQ ID NO: 36556 - protein, 15 aa, synthetic construct
PEDNIRLAVRLESTY

SEQ ID NO: 36557 - protein, 15 aa, synthetic construct
AKPFTIDVDKKLEEG

SEQ ID NO: 36558 - protein, 15 aa, synthetic construct
GCGWKGSGKLPGTSR

SEQ ID NO: 36559 - protein, 15 aa, synthetic construct
DNGFMRKRESQSVEE

SEQ ID NO: 36560 - protein, 15 aa, synthetic construct
NYLIQMARYGQLSEK

SEQ ID NO: 36561 - protein, 15 aa, synthetic construct
GDRWFLRVEDRQDLN

SEQ ID NO: 36562 - protein, 15 aa, synthetic construct
YSKLTVDKSRWQQGN

SEQ ID NO: 36563 - protein, 15 aa, synthetic construct
SDGSFFLYSKLTVDK

SEQ ID NO: 36564 - protein, 15 aa, synthetic construct
LYSKLTVDKSRWQQG

SEQ ID NO: 36565 - protein, 15 aa, synthetic construct
GMVYEGNARDIIKGE

SEQ ID NO: 36566 - protein, 15 aa, synthetic construct
DTGNDKNGKEEVIKR

SEQ ID NO: 36567 - protein, 15 aa, synthetic construct
FGMVYEGNARDIIKG

SEQ ID NO: 36568 - protein, 15 aa, synthetic construct
PFTIDVDKKLEEGQK

SEQ ID NO: 36569 - protein, 15 aa, synthetic construct
DSNMFINLPRVKELL

SEQ ID NO: 36570 - protein, 15 aa, synthetic construct
KTFNWSSTLTNHRKI

SEQ ID NO: 36571 - protein, 15 aa, synthetic construct
DGSFFLYSKLTVDKS

SEQ ID NO: 36572 - protein, 15 aa, synthetic construct
LALLFNMLRHLEQPQ

SEQ ID NO: 36573 - protein, 15 aa, synthetic construct
KKKELARRDDIEDGD

SEQ ID NO: 36574 - protein, 15 aa, synthetic construct
RLAHYNKRSTITSRE

SEQ ID NO: 36575 - protein, 15 aa, synthetic construct
GLGDRWFLRVEDRQD

SEQ ID NO: 36576 - protein, 15 aa, synthetic construct
SCGCGWKGSGKLPGT

SEQ ID NO: 36577 - protein, 15 aa, synthetic construct
HIDNGFMRKRESQSV

SEQ ID NO: 36578 - protein, 15 aa, synthetic construct
KDRQLIGRVEASDAD

SEQ ID NO: 36579 - protein, 15 aa, synthetic construct
THPKGKSYNFNKFGE

SEQ ID NO: 36580 - protein, 15 aa, synthetic construct
LSDSNMFINLPRVKE

SEQ ID NO: 36581 - protein, 15 aa, synthetic construct
QWFKEETRLATGLDG

SEQ ID NO: 36582 - protein, 15 aa, synthetic construct
LPTSFAVITEDATLS

SEQ ID NO: 36583 - protein, 15 aa, synthetic construct
SAKDYMARTPHWALF

SEQ ID NO: 36584 - protein, 15 aa, synthetic construct
GNNVFVVHKPSAVPS

SEQ ID NO: 36585 - protein, 15 aa, synthetic construct
EGQKNIRLLRTELQK

SEQ ID NO: 36586 - protein, 15 aa, synthetic construct
KGKSYNFNKFGENKY

SEQ ID NO: 36587 - protein, 15 aa, synthetic construct
LFNMLRHLEQPQQQL

SEQ ID NO: 36588 - protein, 15 aa, synthetic construct
GLDGMRIENKGRMST

SEQ ID NO: 36589 - protein, 15 aa, synthetic construct
GKSYNFNKFGENKYD

SEQ ID NO: 36590 - protein, 15 aa, synthetic construct
KPFTIDVDKKLEEGQ

SEQ ID NO: 36591 - protein, 15 aa, synthetic construct
CTSSIVIKEPKKPPV

SEQ ID NO: 36592 - protein, 15 aa, synthetic construct
DRQLIGRVEASDADA

SEQ ID NO: 36593 - protein, 15 aa, synthetic construct
FSGYNKWSRPVANIS

SEQ ID NO: 36594 - protein, 15 aa, synthetic construct
SREIQTAVRLLLPGE

SEQ ID NO: 36595 - protein, 15 aa, synthetic construct
GLGAFEAAGFHLNEH

SEQ ID NO: 36596 - protein, 15 aa, synthetic construct
SGYNKWSRPVANISD

SEQ ID NO: 36597 - protein, 15 aa, synthetic construct
KVVKMILKLLEDKNG

SEQ ID NO: 36598 - protein, 15 aa, synthetic construct
ELEHLSELRREAGKD

SEQ ID NO: 36599 - protein, 15 aa, synthetic construct
AVENYLIQMARYGQL

SEQ ID NO: 36600 - protein, 15 aa, synthetic construct
KKELARRDDIEDGDS

SEQ ID NO: 36601 - protein, 15 aa, synthetic construct
NVFVVHKPSAVPSRE

SEQ ID NO: 36602 - protein, 15 aa, synthetic construct
ALLFNMLRHLEQPQQ

SEQ ID NO: 36603 - protein, 15 aa, synthetic construct
ENYLIQMARYGQLSE

SEQ ID NO: 36604 - protein, 15 aa, synthetic construct
SFGMVYEGNARDIIK

SEQ ID NO: 36605 - protein, 15 aa, synthetic construct
DRWFLRVEDRQDLNR

SEQ ID NO: 36606 - protein, 15 aa, synthetic construct
LFSGYNKWSRPVANI

SEQ ID NO: 36607 - protein, 15 aa, synthetic construct
KLFSGYNKWSRPVAN

SEQ ID NO: 36608 - protein, 15 aa, synthetic construct
RWFLRVEDRQDLNRQ

SEQ ID NO: 36609 - protein, 15 aa, synthetic construct
AHYNKRSTITSREIQ

SEQ ID NO: 36610 - protein, 15 aa, synthetic construct
KSYNFNKFGENKYDK

SEQ ID NO: 36611 - protein, 15 aa, synthetic construct
EFQWFKEETRLATGL

SEQ ID NO: 36612 - protein, 15 aa, synthetic construct
QVMQAKKKELARRDD

SEQ ID NO: 36613 - protein, 15 aa, synthetic construct
SKGNNVFVVHKPSAV

SEQ ID NO: 36614 - protein, 15 aa, synthetic construct
QGSFGMVYEGNARDI

SEQ ID NO: 36615 - protein, 15 aa, synthetic construct
TPGAFRNLGSLRYLS

SEQ ID NO: 36616 - protein, 15 aa, synthetic construct
LFVKDIYFLHKIHTN

SEQ ID NO: 36617 - protein, 15 aa, synthetic construct
RPEDNIRLAVRLEST

SEQ ID NO: 36618 - protein, 15 aa, synthetic construct
KGNNVFVVHKPSAVP

SEQ ID NO: 36619 - protein, 15 aa, synthetic construct
MFINLPRVKELLEDD

SEQ ID NO: 36620 - protein, 15 aa, synthetic construct
YRGPVYALHDVSDKI

SEQ ID NO: 36621 - protein, 15 aa, synthetic construct
AKKKELARRDDIEDG

SEQ ID NO: 36622 - protein, 15 aa, synthetic construct
DKTITPDTKALLERA

SEQ ID NO: 36623 - protein, 15 aa, synthetic construct
GSWFAGIVNSAVQTT

SEQ ID NO: 36624 - protein, 15 aa, synthetic construct
PTAEFQDRISGASEK

SEQ ID NO: 36625 - protein, 15 aa, synthetic construct
HPKGKSYNFNKFGEN

SEQ ID NO: 36626 - protein, 15 aa, synthetic construct
AEFQDRISGASEKDI

SEQ ID NO: 36627 - protein, 15 aa, synthetic construct
AKDYMARTPHWALFG

SEQ ID NO: 36628 - protein, 15 aa, synthetic construct
ADYYKANENDAIPIR

SEQ ID NO: 36629 - protein, 15 aa, synthetic construct
FLYSKLTVDKSRWQQ

SEQ ID NO: 36630 - protein, 15 aa, synthetic construct
KKTMPFFLEGKPKAT

SEQ ID NO: 36631 - protein, 15 aa, synthetic construct
DNIRLAVRLESTYQN

SEQ ID NO: 36632 - protein, 15 aa, synthetic construct
IDNGFMRKRESQSVE

SEQ ID NO: 36633 - protein, 15 aa, synthetic construct
RKVVKMILKLLEDKN

SEQ ID NO: 36634 - protein, 15 aa, synthetic construct
EHLSELRREAGKDRS

SEQ ID NO: 36635 - protein, 15 aa, synthetic construct
SDSNMFINLPRVKEL

SEQ ID NO: 36636 - protein, 15 aa, synthetic construct
SNMFINLPRVKELLE

SEQ ID NO: 36637 - protein, 15 aa, synthetic construct
ERKVVKMILKLLEDK

SEQ ID NO: 36638 - protein, 15 aa, synthetic construct
DLALSIENKRKVLGK

SEQ ID NO: 36639 - protein, 15 aa, synthetic construct
VGSWFAGIVNSAVQT

SEQ ID NO: 36640 - protein, 15 aa, synthetic construct
CGKAFSNSSHLIGHG

SEQ ID NO: 36641 - protein, 15 aa, synthetic construct
FVKDIYFLHKIHTNH

SEQ ID NO: 36642 - protein, 15 aa, synthetic construct
SERKVVKMILKLLED

SEQ ID NO: 36643 - protein, 15 aa, synthetic construct
SKNAYVPMAVGSWFA

SEQ ID NO: 36644 - protein, 15 aa, synthetic construct
NMFINLPRVKELLED

SEQ ID NO: 36645 - protein, 15 aa, synthetic construct
GEQLRILEQSGEWWK

SEQ ID NO: 36646 - protein, 15 aa, synthetic construct
ETFSYQSTFSVHQKV

SEQ ID NO: 36647 - protein, 15 aa, synthetic construct
LCTSSIVIKEPKKPP

SEQ ID NO: 36648 - protein, 15 aa, synthetic construct
RGPVYALHDVSDKIP

SEQ ID NO: 36649 - protein, 15 aa, synthetic construct
KKLFSGYNKWSRPVA

SEQ ID NO: 36650 - protein, 15 aa, synthetic construct
KELARRDDIEDGDSM

SEQ ID NO: 36651 - protein, 15 aa, synthetic construct
SFFLYSKLTVDKSRW

SEQ ID NO: 36652 - protein, 15 aa, synthetic construct
SDVDLIPMNDHNAYR

SEQ ID NO: 36653 - protein, 15 aa, synthetic construct
LQEIYQELTQLKAAV

SEQ ID NO: 36654 - protein, 15 aa, synthetic construct
LDDVNEIIRKEFSGP

SEQ ID NO: 36655 - protein, 15 aa, synthetic construct
PLHSATPLPRRPQPR

SEQ ID NO: 36656 - protein, 15 aa, synthetic construct
YQELTQLKAAVGELP

SEQ ID NO: 36657 - protein, 15 aa, synthetic construct
VVKMILKLLEDKNGE

SEQ ID NO: 36658 - protein, 15 aa, synthetic construct
REALLKIFPDSEQRL

SEQ ID NO: 36659 - protein, 15 aa, synthetic construct
DDVNEIIRKEFSGPP

SEQ ID NO: 36660 - protein, 15 aa, synthetic construct
PLAVHSAQHGPGSGA

SEQ ID NO: 36661 - protein, 15 aa, synthetic construct
DVDLIPMNDHNAYRC

SEQ ID NO: 36662 - protein, 15 aa, synthetic construct
TGLDGMRIENKGRMS

SEQ ID NO: 36663 - protein, 15 aa, synthetic construct
RKKVKMKREKASSSG

SEQ ID NO: 36664 - protein, 15 aa, synthetic construct
KDLLLAALEGLKGSS

SEQ ID NO: 36665 - protein, 15 aa, synthetic construct
LLKKLFSGYNKWSRP

SEQ ID NO: 36666 - protein, 15 aa, synthetic construct
GFEKGEQLRILEQSG

SEQ ID NO: 36667 - protein, 15 aa, synthetic construct
EKGEQLRILEQSGEW

SEQ ID NO: 36668 - protein, 15 aa, synthetic construct
NAYVPMAVGSWFAGI

SEQ ID NO: 36669 - protein, 15 aa, synthetic construct
SKRKKVKMKREKASS

SEQ ID NO: 36670 - protein, 15 aa, synthetic construct
QSELEHLSELRREAG

SEQ ID NO: 36671 - protein, 15 aa, synthetic construct
LIALRIEKNELSRIT

SEQ ID NO: 36672 - protein, 15 aa, synthetic construct
EIYQELTQLKAAVGE

SEQ ID NO: 36673 - protein, 15 aa, synthetic construct
FLISLTQKIPTAHKQ

SEQ ID NO: 36674 - protein, 15 aa, synthetic construct
FNMLRHLEQPQQQLS

SEQ ID NO: 36675 - protein, 15 aa, synthetic construct
VMQAKKKELARRDDI

SEQ ID NO: 36676 - protein, 15 aa, synthetic construct
SSLKLVKENNIRSVA

SEQ ID NO: 36677 - protein, 15 aa, synthetic construct
LHSATPLPRRPQPRQ

SEQ ID NO: 36678 - protein, 15 aa, synthetic construct
AYVPMAVGSWFAGIV

SEQ ID NO: 36679 - protein, 15 aa, synthetic construct
GVPLHSATPLPRRPQ

SEQ ID NO: 36680 - protein, 15 aa, synthetic construct
LDKTITPDTKALLER

SEQ ID NO: 36681 - protein, 15 aa, synthetic construct
ESKMACAAQNASLLK

SEQ ID NO: 36682 - protein, 15 aa, synthetic construct
IALRIEKNELSRITP

SEQ ID NO: 36683 - protein, 15 aa, synthetic construct
NLFVKDIYFLHKIHT

SEQ ID NO: 36684 - protein, 15 aa, synthetic construct
KRKKVKMKREKASSS

SEQ ID NO: 36685 - protein, 15 aa, synthetic construct
KTITPDTKALLERAK

SEQ ID NO: 36686 - protein, 15 aa, synthetic construct
YVPMAVGSWFAGIVN

SEQ ID NO: 36687 - protein, 15 aa, synthetic construct
LRPEDNIRLAVRLES

SEQ ID NO: 36688 - protein, 15 aa, synthetic construct
DLLLAALEGLKGSSE

SEQ ID NO: 36689 - protein, 15 aa, synthetic construct
VLVAQVVAEMWRRNG

SEQ ID NO: 36690 - protein, 15 aa, synthetic construct
LKKLFSGYNKWSRPV

SEQ ID NO: 36691 - protein, 15 aa, synthetic construct
SHLIGHGRIHSGEKP

SEQ ID NO: 36692 - protein, 15 aa, synthetic construct
SSHLIGHGRIHSGEK

SEQ ID NO: 36693 - protein, 15 aa, synthetic construct
LGVPLHSATPLPRRP

SEQ ID NO: 36694 - protein, 15 aa, synthetic construct
RESQSVEEALKKLGI

SEQ ID NO: 36695 - protein, 15 aa, synthetic construct
SSTLTNHRKIYTEEK

SEQ ID NO: 36696 - protein, 15 aa, synthetic construct
SNSSHLIGHGRIHSG

SEQ ID NO: 36697 - protein, 15 aa, synthetic construct
RQDLALSIENKRKVL

SEQ ID NO: 36698 - protein, 15 aa, synthetic construct
FEKGEQLRILEQSGE

SEQ ID NO: 36699 - protein, 15 aa, synthetic construct
EALLKIFPDSEQRLK

SEQ ID NO: 36700 - protein, 15 aa, synthetic construct
VQSELEHLSELRREA

SEQ ID NO: 36701 - protein, 15 aa, synthetic construct
QDLALSIENKRKVLG

SEQ ID NO: 36702 - protein, 15 aa, synthetic construct
QNASLLKINNKNALE

SEQ ID NO: 36703 - protein, 15 aa, synthetic construct
QELTQLKAAVGELPE

SEQ ID NO: 36704 - protein, 15 aa, synthetic construct
ITSREIQTAVRLLLP

SEQ ID NO: 36705 - protein, 15 aa, synthetic construct
REIQTAVRLLLPGEL

SEQ ID NO: 36706 - protein, 15 aa, synthetic construct
FSDVDLIPMNDHNAY

SEQ ID NO: 36707 - protein, 15 aa, synthetic construct
LPLAVHSAQHGPGSG

SEQ ID NO: 36708 - protein, 15 aa, synthetic construct
HLSELRREAGKDRSS

SEQ ID NO: 36709 - protein, 15 aa, synthetic construct
EEGQKNIRLLRTELQ

SEQ ID NO: 36710 - protein, 15 aa, synthetic construct
SLKLVKENNIRSVAF

SEQ ID NO: 36711 - protein, 15 aa, synthetic construct
YLIQMARYGQLSEKV

SEQ ID NO: 36712 - protein, 15 aa, synthetic construct
QESKMACAAQNASLL

SEQ ID NO: 36713 - protein, 15 aa, synthetic construct
IKLNELWKNFGFKKD

SEQ ID NO: 36714 - protein, 15 aa, synthetic construct
TSREIQTAVRLLLPG

SEQ ID NO: 36715 - protein, 15 aa, synthetic construct
NIRLAVRLESTYQNR

SEQ ID NO: 36716 - protein, 15 aa, synthetic construct
IYQELTQLKAAVGEL

SEQ ID NO: 36717 - protein, 15 aa, synthetic construct
ALDKTITPDTKALLE

SEQ ID NO: 36718 - protein, 15 aa, synthetic construct
LVAQVVAEMWRRNGL

SEQ ID NO: 36719 - protein, 15 aa, synthetic construct
NSSHLIGHGRIHSGE

SEQ ID NO: 36720 - protein, 15 aa, synthetic construct
RLYISGGFGGVALGR

SEQ ID NO: 36721 - protein, 15 aa, synthetic construct
ARRDDIEDGDSMISS

SEQ ID NO: 36722 - protein, 15 aa, synthetic construct
QDRISGASEKDIVHS

SEQ ID NO: 36723 - protein, 15 aa, synthetic construct
SWFAGIVNSAVQTTF

SEQ ID NO: 36724 - protein, 15 aa, synthetic construct
LISQFMQGYPSKVHI

SEQ ID NO: 36725 - protein, 15 aa, synthetic construct
PRGLASGRLPLAVHS

SEQ ID NO: 36726 - protein, 15 aa, synthetic construct
PSKCQSAAPSQLDKP

SEQ ID NO: 36727 - protein, 15 aa, synthetic construct
DLISQFMQGYPSKVH

SEQ ID NO: 36728 - protein, 15 aa, synthetic construct
RNKFYSFALDKTITP

SEQ ID NO: 36729 - protein, 15 aa, synthetic construct
VKLAKGTVQTGMDTT

SEQ ID NO: 36730 - protein, 15 aa, synthetic construct
IGRVEASDADAGIDG

SEQ ID NO: 36731 - protein, 15 aa, synthetic construct
MEESVAHAVAAVGSR

SEQ ID NO: 36732 - protein, 15 aa, synthetic construct
AAGEGEARPSTPQRQ

SEQ ID NO: 36733 - protein, 15 aa, synthetic construct
VKMKREKASSSGKRQ

SEQ ID NO: 36734 - protein, 15 aa, synthetic construct
TRGLQTGPVPPGRLA

SEQ ID NO: 36735 - protein, 15 aa, synthetic construct
HLIGHGRIHSGEKPY

SEQ ID NO: 36736 - protein, 15 aa, synthetic construct
IIRKEFSGPPARNQT

SEQ ID NO: 36737 - protein, 15 aa, synthetic construct
LINDALHRSGQIERG

SEQ ID NO: 36738 - protein, 15 aa, synthetic construct
ALHRSGQIERGCEGP

SEQ ID NO: 36739 - protein, 15 aa, synthetic construct
PREYWDYESHVVEWG

SEQ ID NO: 36740 - protein, 15 aa, synthetic construct
AVKLAKGTVQTGMDT

SEQ ID NO: 36741 - protein, 15 aa, synthetic construct
TPLPVTDASSVPTGH

SEQ ID NO: 36742 - protein, 15 aa, synthetic construct
QSELPTSFAVITEDA

SEQ ID NO: 36743 - protein, 15 aa, synthetic construct
FMRKRESQSVEEALK

SEQ ID NO: 36744 - protein, 15 aa, synthetic construct
KDIVHSGLAYTMERS

SEQ ID NO: 36745 - protein, 15 aa, synthetic construct
NEIIRKEFSGPPARN

SEQ ID NO: 36746 - protein, 15 aa, synthetic construct
GSSGAASEPVVLGEE

SEQ ID NO: 36747 - protein, 15 aa, synthetic construct
ESSSRGQAASSHEQA

SEQ ID NO: 36748 - protein, 15 aa, synthetic construct
KRSIEEAVPAVCKTR

SEQ ID NO: 36749 - protein, 15 aa, synthetic construct
GAVKLAKGTVQTGMD

SEQ ID NO: 36750 - protein, 15 aa, synthetic construct
WFAGIVNSAVQTTFV

SEQ ID NO: 36751 - protein, 15 aa, synthetic construct
EIIRKEFSGPPARNQ

SEQ ID NO: 36752 - protein, 15 aa, synthetic construct
TESSSRGQAASSHEQ

SEQ ID NO: 36753 - protein, 15 aa, synthetic construct
QRQASNASKSNIAAA

SEQ ID NO: 36754 - protein, 15 aa, synthetic construct
LLKIFPDSEQRLKID

SEQ ID NO: 36755 - protein, 15 aa, synthetic construct
TGAVKLAKGTVQTGM

SEQ ID NO: 36756 - protein, 15 aa, synthetic construct
ISQFMQGYPSKVHIL

SEQ ID NO: 36757 - protein, 15 aa, synthetic construct
NKFYSFALDKTITPD

SEQ ID NO: 36758 - protein, 15 aa, synthetic construct
VMPPSTQAVSFQPET

SEQ ID NO: 36759 - protein, 15 aa, synthetic construct
EFQDRISGASEKDIV

SEQ ID NO: 36760 - protein, 15 aa, synthetic construct
HTESSSRGQAASSHE

SEQ ID NO: 36761 - protein, 15 aa, synthetic construct
DALHRSGQIERGCEG

SEQ ID NO: 36762 - protein, 15 aa, synthetic construct
RQASNASKSNIAAAN

SEQ ID NO: 36763 - protein, 15 aa, synthetic construct
QASNASKSNIAAANS

SEQ ID NO: 36764 - protein, 15 aa, synthetic construct
QWGSSGAASEPVVLG

SEQ ID NO: 36765 - protein, 15 aa, synthetic construct
PPQVSGSRSSPPAPP

SEQ ID NO: 36766 - protein, 15 aa, synthetic construct
EESVAHAVAAVGSRL

SEQ ID NO: 36767 - protein, 15 aa, synthetic construct
PLPVTDASSVPTGHA

SEQ ID NO: 36768 - protein, 15 aa, synthetic construct
GRVEASDADAGIDGV

SEQ ID NO: 36769 - protein, 15 aa, synthetic construct
RHTESSSRGQAASSH

SEQ ID NO: 36770 - protein, 15 aa, synthetic construct
ASEKDIVHSGLAYTM

SEQ ID NO: 36771 - protein, 15 aa, synthetic construct
FQDRISGASEKDIVH

SEQ ID NO: 36772 - protein, 15 aa, synthetic construct
EVAQRPAKALEGQGA

SEQ ID NO: 36773 - protein, 15 aa, synthetic construct
RKRESQSVEEALKKL

SEQ ID NO: 36774 - protein, 15 aa, synthetic construct
RQLIGRVEASDADAG

SEQ ID NO: 36775 - protein, 15 aa, synthetic construct
TSNARAVIIFANEDD

SEQ ID NO: 36776 - protein, 15 aa, synthetic construct
YWDYESHVVEWGNQD

SEQ ID NO: 36777 - protein, 15 aa, synthetic construct
LIGRVEASDADAGID

SEQ ID NO: 36778 - protein, 15 aa, synthetic construct
KKVKMKREKASSSGK

SEQ ID NO: 36779 - protein, 15 aa, synthetic construct
NDALHRSGQIERGCE

SEQ ID NO: 36780 - protein, 15 aa, synthetic construct
LETSNARAVIIFANE

SEQ ID NO: 36781 - protein, 15 aa, synthetic construct
CPSKCQSAAPSQLDK

SEQ ID NO: 36782 - protein, 15 aa, synthetic construct
YEVAQRPAKALEGQG

SEQ ID NO: 36783 - protein, 15 aa, synthetic construct
DRISGASEKDIVHSG

SEQ ID NO: 36784 - protein, 15 aa, synthetic construct
EKDIVHSGLAYTMER

SEQ ID NO: 36785 - protein, 15 aa, synthetic construct
KANENDAIPIRWMPP

SEQ ID NO: 36786 - protein, 15 aa, synthetic construct
KVKMKREKASSSGKR

SEQ ID NO: 36787 - protein, 15 aa, synthetic construct
QLIGRVEASDADAGI

SEQ ID NO: 36788 - protein, 15 aa, synthetic construct
SELPTSFAVITEDAT

SEQ ID NO: 36789 - protein, 15 aa, synthetic construct
SKCQSAAPSQLDKPR

SEQ ID NO: 36790 - protein, 15 aa, synthetic construct
AVSFQPETDNRANFS

SEQ ID NO: 36791 - protein, 15 aa, synthetic construct
LAGPPAVATSAAAAA

SEQ ID NO: 36792 - protein, 15 aa, synthetic construct
PKVPVTFDDVAVHFS

SEQ ID NO: 36793 - protein, 15 aa, synthetic construct
LVLVAQVVAEMWRRN

SEQ ID NO: 36794 - protein, 15 aa, synthetic construct
ETSNARAVIIFANED

SEQ ID NO: 36795 - protein, 15 aa, synthetic construct
SVAHAVAAVGSRLYI

SEQ ID NO: 36796 - protein, 15 aa, synthetic construct
RRDDIEDGDSMISSA

SEQ ID NO: 36797 - protein, 15 aa, synthetic construct
SEKDIVHSGLAYTME

SEQ ID NO: 36798 - protein, 15 aa, synthetic construct
QTRGLQTGPVPPGRL

SEQ ID NO: 36799 - protein, 15 aa, synthetic construct
AQWGSSGAASEPVVL

SEQ ID NO: 36800 - protein, 15 aa, synthetic construct
RKRSIEEAVPAVCKT

SEQ ID NO: 36801 - protein, 15 aa, synthetic construct
KAQWGSSGAASEPVV

SEQ ID NO: 36802 - protein, 15 aa, synthetic construct
AVGSWFAGIVNSAVQ

SEQ ID NO: 36803 - protein, 15 aa, synthetic construct
TSFAVITEDATLSPE

SEQ ID NO: 36804 - protein, 15 aa, synthetic construct
RSIEEAVPAVCKTRT

SEQ ID NO: 36805 - protein, 15 aa, synthetic construct
WGSSGAASEPVVLGE

SEQ ID NO: 36806 - protein, 15 aa, synthetic construct
RPESPEYSGGNIVRV

SEQ ID NO: 36807 - protein, 15 aa, synthetic construct
DDIEDGDSMISSATS

SEQ ID NO: 36808 - protein, 15 aa, synthetic construct
FPPYPKPGEISNDPI

SEQ ID NO: 36809 - protein, 15 aa, synthetic construct
PPYPKPGEISNDPIT

SEQ ID NO: 36810 - protein, 15 aa, synthetic construct
REYWDYESHVVEWGN

SEQ ID NO: 36811 - protein, 15 aa, synthetic construct
INDALHRSGQIERGC

SEQ ID NO: 36812 - protein, 15 aa, synthetic construct
RLAGPPAVATSAAAA

SEQ ID NO: 36813 - protein, 15 aa, synthetic construct
MPPSTQAVSFQPETD

SEQ ID NO: 36814 - protein, 15 aa, synthetic construct
LVMPPSTQAVSFQPE

SEQ ID NO: 36815 - protein, 15 aa, synthetic construct
RRKRSIEEAVPAVCK

SEQ ID NO: 36816 - protein, 15 aa, synthetic construct
ESVAHAVAAVGSRLY

SEQ ID NO: 36817 - protein, 15 aa, synthetic construct
PPPQVSGSRSSPPAP

SEQ ID NO: 36818 - protein, 15 aa, synthetic construct
TTPLPVTDASSVPTG

SEQ ID NO: 36819 - protein, 15 aa, synthetic construct
RDDIEDGDSMISSAT

SEQ ID NO: 36820 - protein, 15 aa, synthetic construct
ELPTSFAVITEDATL

SEQ ID NO: 36821 - protein, 15 aa, synthetic construct
MRKRESQSVEEALKK

SEQ ID NO: 36822 - protein, 15 aa, synthetic construct
KVPVTFDDVAVHFSE

SEQ ID NO: 36823 - protein, 15 aa, synthetic construct
EYWDYESHVVEWGNQ

SEQ ID NO: 36824 - protein, 15 aa, synthetic construct
DYESHVVEWGNQDDY

SEQ ID NO: 36825 - protein, 15 aa, synthetic construct
WDYESHVVEWGNQDD

SEQ ID NO: 36826 - protein, 15 aa, synthetic construct
KKAQWGSSGAASEPV

SEQ ID NO: 36827 - protein, 15 aa, synthetic construct
RNIYSADYYKANEND

SEQ ID NO: 36828 - protein, 15 aa, synthetic construct
KRSTITSREIQTAVR

SEQ ID NO: 36829 - protein, 15 aa, synthetic construct
PSTQAVSFQPETDNR

SEQ ID NO: 36830 - protein, 15 aa, synthetic construct
SRNIYSADYYKANEN

SEQ ID NO: 36831 - protein, 15 aa, synthetic construct
QHWELIQEDILDTGN

SEQ ID NO: 36832 - protein, 15 aa, synthetic construct
DVDLHTIHFHAESFL

SEQ ID NO: 36833 - protein, 15 aa, synthetic construct
TQAVSFQPETDNRAN

SEQ ID NO: 36834 - protein, 15 aa, synthetic construct
LERNKFYSFALDKTI

SEQ ID NO: 36835 - protein, 15 aa, synthetic construct
QAVSFQPETDNRANF

SEQ ID NO: 36836 - protein, 15 aa, synthetic construct
RPREYWDYESHVVEW

SEQ ID NO: 36837 - protein, 15 aa, synthetic construct
LGAFEAAGFHLNEHL

SEQ ID NO: 36838 - protein, 15 aa, synthetic construct
GQDVDLHTIHFHAES

SEQ ID NO: 36839 - protein, 15 aa, synthetic construct
MGQDVDLHTIHFHAE

SEQ ID NO: 36840 - protein, 15 aa, synthetic construct
FYVQVSGTEYEVAQR

SEQ ID NO: 36841 - protein, 15 aa, synthetic construct
SNARAVIIFANEDDI

SEQ ID NO: 36842 - protein, 15 aa, synthetic construct
GPVYALHDVSDKIPM

SEQ ID NO: 36843 - protein, 15 aa, synthetic construct
IYSADYYKANENDAI

SEQ ID NO: 36844 - protein, 15 aa, synthetic construct
QDVDLHTIHFHAESF

SEQ ID NO: 36845 - protein, 15 aa, synthetic construct
RMLDDYEEISAGDEG

SEQ ID NO: 36846 - protein, 15 aa, synthetic construct
YVQVSGTEYEVAQRP

SEQ ID NO: 36847 - protein, 15 aa, synthetic construct
STQAVSFQPETDNRA

SEQ ID NO: 36848 - protein, 15 aa, synthetic construct
PPSTQAVSFQPETDN

SEQ ID NO: 36849 - protein, 15 aa, synthetic construct
ERNKFYSFALDKTIT

SEQ ID NO: 36850 - protein, 15 aa, synthetic construct
VPKVPVTFDDVAVHF

SEQ ID NO: 36851 - protein, 15 aa, synthetic construct
RAVIIFANEDDIRRV

SEQ ID NO: 36852 - protein, 15 aa, synthetic construct
GGLGAFEAAGFHLNE

SEQ ID NO: 36853 - protein, 15 aa, synthetic construct
HRPREYWDYESHVVE

SEQ ID NO: 36854 - protein, 15 aa, synthetic construct
NIYSADYYKANENDA

SEQ ID NO: 36855 - protein, 15 aa, synthetic construct
LEGLKGSSEAPGKDS

SEQ ID NO: 36856 - protein, 15 aa, synthetic construct
YDLISQFMQGYPSKV

SEQ ID NO: 36857 - protein, 15 aa, synthetic construct
GSRLYISGGFGGVAL

SEQ ID NO: 36858 - protein, 15 aa, synthetic construct
SIEEAVPAVCKTRTV

SEQ ID NO: 36859 - protein, 15 aa, synthetic construct
RVEASDADAGIDGVI

SEQ ID NO: 36860 - protein, 15 aa, synthetic construct
ALEGLKGSSEAPGKD

SEQ ID NO: 36861 - protein, 15 aa, synthetic construct
SQFMQGYPSKVHILP

SEQ ID NO: 36862 - protein, 15 aa, synthetic construct
LTGAVKLAKGTVQTG

SEQ ID NO: 36863 - protein, 15 aa, synthetic construct
IDPAYSKAYGRMGLA

SEQ ID NO: 36864 - protein, 15 aa, synthetic construct
KLAKGTVQTGMDTTK

SEQ ID NO: 36865 - protein, 15 aa, synthetic construct
IRRKRSIEEAVPAVC

SEQ ID NO: 36866 - protein, 15 aa, synthetic construct
SRLYISGGFGGVALG

SEQ ID NO: 36867 - protein, 15 aa, synthetic construct
RGLQTGPVPPGRLAG

SEQ ID NO: 36868 - protein, 15 aa, synthetic construct
KMKREKASSSGKRQS

SEQ ID NO: 36869 - protein, 15 aa, synthetic construct
NKRSTITSREIQTAV

SEQ ID NO: 36870 - protein, 15 aa, synthetic construct
TFSAKDYMARTPHWA

SEQ ID NO: 36871 - protein, 15 aa, synthetic construct
CTETFSYQSTFSVHQ

SEQ ID NO: 36872 - protein, 15 aa, synthetic construct
ARTPHWALFGASERG

SEQ ID NO: 36873 - protein, 15 aa, synthetic construct
GTEYEVAQRPAKALE

SEQ ID NO: 36874 - protein, 15 aa, synthetic construct
RKIYTEEKPYKCEEY

SEQ ID NO: 36875 - protein, 15 aa, synthetic construct
RGQAASSHEQARSSA

SEQ ID NO: 36876 - protein, 15 aa, synthetic construct
RSTITSREIQTAVRL

SEQ ID NO: 36877 - protein, 15 aa, synthetic construct
NKDRQLIGRVEASDA

SEQ ID NO: 36878 - protein, 15 aa, synthetic construct
FFLYSKLTVDKSRWQ

SEQ ID NO: 36879 - protein, 15 aa, synthetic construct
EYEVAQRPAKALEGQ

SEQ ID NO: 36880 - protein, 15 aa, synthetic construct
QRPVHGLGVPLHSAT

SEQ ID NO: 36881 - protein, 15 aa, synthetic construct
GQAASSHEQARSSAG

SEQ ID NO: 36882 - protein, 15 aa, synthetic construct
RRWWYRCYAYDSNSP

SEQ ID NO: 36883 - protein, 15 aa, synthetic construct
FSAKDYMARTPHWAL

SEQ ID NO: 36884 - protein, 15 aa, synthetic construct
HRKIYTEEKPYKCEE

SEQ ID NO: 36885 - protein, 15 aa, synthetic construct
PQRPVHGLGVPLHSA

SEQ ID NO: 36886 - protein, 15 aa, synthetic construct
KDYMARTPHWALFGA

SEQ ID NO: 36887 - protein, 15 aa, synthetic construct
TEYEVAQRPAKALEG

SEQ ID NO: 36888 - protein, 15 aa, synthetic construct
AHAVAAVGSRLYISG

SEQ ID NO: 36889 - protein, 10 aa, synthetic construct
RPDSPAHVLL

SEQ ID NO: 36890 - protein, 9 aa, synthetic construct
TLICSPTHG

SEQ ID NO: 36891 - protein, 9 aa, synthetic construct
YVFVTPVEV

SEQ ID NO: 36892 - protein, 9 aa, synthetic construct
VLFLDYVMF

SEQ ID NO: 36893 - protein, 11 aa, synthetic construct
AVVEDVSWHLL

SEQ ID NO: 36894 - protein, 10 aa, synthetic construct
AVVEDVSWHL

SEQ ID NO: 36895 - protein, 9 aa, synthetic construct
EQFPESSEL

SEQ ID NO: 36896 - protein, 10 aa, synthetic construct
GMLRAFLSEV

SEQ ID NO: 36897 - protein, 9 aa, synthetic construct
FKSPHIRRL

SEQ ID NO: 36898 - protein, 9 aa, synthetic construct
ALVQYMEGL

SEQ ID NO: 36899 - protein, 10 aa, synthetic construct
AEQFPESSEL

SEQ ID NO: 36900 - protein, 11 aa, synthetic construct
FLDYVMFTIHM

SEQ ID NO: 36901 - protein, 9 aa, synthetic construct
IQFLSNPAV

SEQ ID NO: 36902 - protein, 9 aa, synthetic construct
FLSNPAVTF

SEQ ID NO: 36903 - protein, 9 aa, synthetic construct
FLDYVMFTI

SEQ ID NO: 36904 - protein, 9 aa, synthetic construct
RSIGVPWTL

SEQ ID NO: 36905 - protein, 9 aa, synthetic construct
FVKDIPRSA

SEQ ID NO: 36906 - protein, 10 aa, synthetic construct
GLNDDYVFVT

SEQ ID NO: 36907 - protein, 11 aa, synthetic construct
FLSNPAVTFGT

SEQ ID NO: 36908 - protein, 9 aa, synthetic construct
VQYMEGLNV

SEQ ID NO: 36909 - protein, 9 aa, synthetic construct
AAVGVPWTL

SEQ ID NO: 36910 - protein, 11 aa, synthetic construct
ALVQYMEGLNV

SEQ ID NO: 36911 - protein, 10 aa, synthetic construct
FMDPATFINM

SEQ ID NO: 36912 - protein, 9 aa, synthetic construct
APQTPSALL

SEQ ID NO: 36913 - protein, 10 aa, synthetic construct
VLFLDYVMFT

SEQ ID NO: 36914 - protein, 11 aa, synthetic construct
FINMYNRPIHI

SEQ ID NO: 36915 - protein, 10 aa, synthetic construct
KAPQTPSALL

SEQ ID NO: 36916 - protein, 11 aa, synthetic construct
SKVPYIVRQCV

SEQ ID NO: 36917 - protein, 10 aa, synthetic construct
ALPSRPGASR

SEQ ID NO: 36918 - protein, 10 aa, synthetic construct
RALATGMRRK

SEQ ID NO: 36919 - protein, 11 aa, synthetic construct
RALPSRPGASR

SEQ ID NO: 36920 - protein, 11 aa, synthetic construct
GTVQTGMDTTK

SEQ ID NO: 36921 - protein, 11 aa, synthetic construct
TMKMGSLERKK

SEQ ID NO: 36922 - protein, 9 aa, synthetic construct
RALATGMRR

SEQ ID NO: 36923 - protein, 9 aa, synthetic construct
KMGSLERKK

SEQ ID NO: 36924 - protein, 9 aa, synthetic construct
LIQRVVREN

SEQ ID NO: 36925 - protein, 9 aa, synthetic construct
RSKVPYIVR

SEQ ID NO: 36926 - protein, 8 aa, synthetic construct
ALATGMRR

SEQ ID NO: 36927 - protein, 9 aa, synthetic construct
ALATGMRRK

SEQ ID NO: 36928 - protein, 9 aa, synthetic construct
ATFINMYNR

SEQ ID NO: 36929 - protein, 9 aa, synthetic construct
KQGGKARAK

SEQ ID NO: 36930 - protein, 9 aa, synthetic construct
CSSILTTHK

SEQ ID NO: 36931 - protein, 10 aa, synthetic construct
TVQTGMDTTK

SEQ ID NO: 36932 - protein, 10 aa, synthetic construct
VTFKSPHIRR

SEQ ID NO: 36933 - protein, 10 aa, synthetic construct
RSIGVPWTLH

SEQ ID NO: 36934 - protein, 10 aa, synthetic construct
KCSSILTTHK

SEQ ID NO: 36935 - protein, 9 aa, synthetic construct
PSCPQLPPR

SEQ ID NO: 36936 - protein, 9 aa, synthetic construct
VTFKSPHIR

SEQ ID NO: 36937 - protein, 11 aa, synthetic construct
GTMGHGLPGQK

SEQ ID NO: 36938 - protein, 9 aa, synthetic construct
SLERKKLRY

SEQ ID NO: 36939 - protein, 10 aa, synthetic construct
GLIQRVVREN

SEQ ID NO: 36940 - protein, 11 aa, synthetic construct
GLIQRVVRENK

SEQ ID NO: 36941 - protein, 9 aa, synthetic construct
MGHGLPGQK

SEQ ID NO: 36942 - protein, 11 aa, synthetic construct
ALATGMRRKHK

SEQ ID NO: 36943 - protein, 9 aa, synthetic construct
AVGVPWTLH

SEQ ID NO: 36944 - protein, 11 aa, synthetic construct
RGKQGGKARAK

SEQ ID NO: 36945 - protein, 9 aa, synthetic construct
HLLQFHGTK

SEQ ID NO: 36946 - protein, 11 aa, synthetic construct
KTEPGLSSHYG

SEQ ID NO: 36947 - protein, 11 aa, synthetic construct
KQGGKARAKAK

SEQ ID NO: 36948 - protein, 11 aa, synthetic construct
SCRALATGMRR

SEQ ID NO: 36949 - protein, 11 aa, synthetic construct
SSAPRCLGKSK

SEQ ID NO: 36950 - protein, 10 aa, synthetic construct
TMGHGLPGQK

SEQ ID NO: 36951 - protein, 9 aa, synthetic construct
ATGMRRKHK

SEQ ID NO: 36952 - protein, 11 aa, synthetic construct
PQTPSALLGQK

SEQ ID NO: 36953 - protein, 11 aa, synthetic construct
FLELNRNFTSL

SEQ ID NO: 36954 - protein, 9 aa, synthetic construct
VPYIVRQCV

SEQ ID NO: 36955 - protein, 10 aa, synthetic construct
KAPQETYADI

SEQ ID NO: 36956 - protein, 11 aa, synthetic construct
TPITSEVSDTM

SEQ ID NO: 36957 - protein, 8 aa, synthetic construct
TPITSEVS

SEQ ID NO: 36958 - protein, 9 aa, synthetic construct
RKKLRYSDL

SEQ ID NO: 36959 - protein, 9 aa, synthetic construct
KAPQTPSAL

SEQ ID NO: 36960 - protein, 9 aa, synthetic construct
TFYRDGSAL

SEQ ID NO: 36961 - protein, 9 aa, synthetic construct
WPLTQVTFY

SEQ ID NO: 36962 - protein, 9 aa, synthetic construct
KAFKCSSIL

SEQ ID NO: 36963 - protein, 11 aa, synthetic construct
ASPPPPAGPSL

SEQ ID NO: 36964 - protein, 9 aa, synthetic construct
VPWTLHTWL

SEQ ID NO: 36965 - protein, 9 aa, synthetic construct
RPRRRRSTE

SEQ ID NO: 36966 - protein, 8 aa, synthetic construct
RPRRRRST

SEQ ID NO: 36967 - protein, 11 aa, synthetic construct
RPRRRRSTESW

SEQ ID NO: 36968 - protein, 10 aa, synthetic construct
RPRRRRSTES

SEQ ID NO: 36969 - protein, 10 aa, synthetic construct
SPGPCPGPGP

SEQ ID NO: 36970 - protein, 11 aa, synthetic construct
VPPTTEGTRGL

SEQ ID NO: 36971 - protein, 9 aa, synthetic construct
LPSRPGASR

SEQ ID NO: 36972 - protein, 8 aa, synthetic construct
FLELNRNF

SEQ ID NO: 36973 - protein, 11 aa, synthetic construct
RDPPNRVPPTT

SEQ ID NO: 36974 - protein, 10 aa, synthetic construct
IPRSATSYTL

SEQ ID NO: 36975 - protein, 10 aa, synthetic construct
RPGASRSGGL

SEQ ID NO: 36976 - protein, 9 aa, synthetic construct
VVTKRERSK

SEQ ID NO: 36977 - protein, 9 aa, synthetic construct
SMGMLRAFL

SEQ ID NO: 36978 - protein, 9 aa, synthetic construct
APQETYADI

SEQ ID NO: 36979 - protein, 10 aa, synthetic construct
SPPPPAGPSL

SEQ ID NO: 36980 - protein, 9 aa, synthetic construct
HLRPRDTTG

SEQ ID NO: 36981 - protein, 8 aa, synthetic construct
HLRPRDTT

SEQ ID NO: 36982 - protein, 9 aa, synthetic construct
VRENKEGCY

SEQ ID NO: 36983 - protein, 9 aa, synthetic construct
RRRRSTESW

SEQ ID NO: 36984 - protein, 9 aa, synthetic construct
KRKASMGML

SEQ ID NO: 36985 - protein, 11 aa, synthetic construct
YGHSSSVSQTF

SEQ ID NO: 36986 - protein, 11 aa, synthetic construct
VRSGSGHRQLL

SEQ ID NO: 36987 - protein, 11 aa, synthetic construct
DIRSIGVPWTL

SEQ ID NO: 36988 - protein, 10 aa, synthetic construct
PRRRRSTESW

SEQ ID NO: 36989 - protein, 10 aa, synthetic construct
RERSKVPYIV

SEQ ID NO: 36990 - protein, 10 aa, synthetic construct
RRRRSTESWI

SEQ ID NO: 36991 - protein, 9 aa, synthetic construct
YGHSSSVSQ

SEQ ID NO: 36992 - protein, 9 aa, synthetic construct
KRERSKVPY

SEQ ID NO: 36993 - protein, 9 aa, synthetic construct
GKTLLVRPY

SEQ ID NO: 36994 - protein, 8 aa, synthetic construct
IRSIGVPW

SEQ ID NO: 36995 - protein, 11 aa, synthetic construct
IRSIGVPWTLH

SEQ ID NO: 36996 - protein, 10 aa, synthetic construct
IRSIGVPWTL

SEQ ID NO: 36997 - protein, 9 aa, synthetic construct
ERSKVPYIV

SEQ ID NO: 36998 - protein, 10 aa, synthetic construct
VRSGSGHRQL

SEQ ID NO: 36999 - protein, 9 aa, synthetic construct
RRKHKISGM

SEQ ID NO: 37000 - protein, 11 aa, synthetic construct
IQFLSNPAVTF

SEQ ID NO: 37001 - protein, 10 aa, synthetic construct
GHSSSVSQTF

SEQ ID NO: 37002 - protein, 9 aa, synthetic construct
QKEPDGEGL

SEQ ID NO: 37003 - protein, 11 aa, synthetic construct
RRKHKISGMIL

SEQ ID NO: 37004 - protein, 11 aa, synthetic construct
ERSEDPPKRIY

SEQ ID NO: 37005 - protein, 9 aa, synthetic construct
NQCFIQFLS

SEQ ID NO: 37006 - protein, 10 aa, synthetic construct
HGGLGSQPYY

SEQ ID NO: 37007 - protein, 9 aa, synthetic construct
HGGLGSQPY

SEQ ID NO: 37008 - protein, 9 aa, synthetic construct
SEDPPKRIY

SEQ ID NO: 37009 - protein, 9 aa, synthetic construct
VVEDVSWHL

SEQ ID NO: 37010 - protein, 11 aa, synthetic construct
RSEDPPKRIYF

SEQ ID NO: 37011 - protein, 9 aa, synthetic construct
ITSEVSDTM

SEQ ID NO: 37012 - protein, 9 aa, synthetic construct
LAAAVGVPW

SEQ ID NO: 37013 - protein, 10 aa, synthetic construct
RSEDPPKRIY

SEQ ID NO: 37014 - protein, 11 aa, synthetic construct
FMDPATFINMY

SEQ ID NO: 37015 - protein, 10 aa, synthetic construct
LAKGTVQTGM

SEQ ID NO: 37016 - protein, 9 aa, synthetic construct
RSEDPPKRI

SEQ ID NO: 37017 - protein, 10 aa, synthetic construct
SVFLELNRNF

SEQ ID NO: 37018 - protein, 9 aa, synthetic construct
GGLGSQPYY

SEQ ID NO: 37019 - protein, 8 aa, synthetic construct
LQFHGTKY

SEQ ID NO: 37020 - protein, 9 aa, synthetic construct
ASMGMLRAF

SEQ ID NO: 37021 - protein, 10 aa, synthetic construct
AAAVGVPWTL

SEQ ID NO: 37022 - protein, 8 aa, synthetic construct
WHSVFLEL

SEQ ID NO: 37023 - protein, 10 aa, synthetic construct
QFLSNPAVTF

SEQ ID NO: 37024 - protein, 9 aa, synthetic construct
VFLELNRNF

SEQ ID NO: 37025 - protein, 9 aa, synthetic construct
GYNPATGIF

SEQ ID NO: 37026 - protein, 9 aa, synthetic construct
SHYGHSSSV

SEQ ID NO: 37027 - protein, 8 aa, synthetic construct
LSNPAVTF

SEQ ID NO: 37028 - protein, 9 aa, synthetic construct
DYVMFTIHM

SEQ ID NO: 37029 - protein, 11 aa, synthetic construct
HSGYNPATGIF

SEQ ID NO: 37030 - protein, 10 aa, synthetic construct
SGYNPATGIF

SEQ ID NO: 37031 - protein, 9 aa, synthetic construct
DYKQALVQY

SEQ ID NO: 37032 - protein, 9 aa, synthetic construct
YKQALVQYM

SEQ ID NO: 37033 - protein, 9 aa, synthetic construct
SWHSVFLEL

SEQ ID NO: 37034 - protein, 8 aa, synthetic construct
MGMLRAFL

SEQ ID NO: 37035 - protein, 8 aa, synthetic construct
FYRDGSAL

SEQ ID NO: 37036 - protein, 15 aa, synthetic construct
ALATGMRRKHKISGM

SEQ ID NO: 37037 - protein, 15 aa, synthetic construct
GKAFKCSSILTTHKR

SEQ ID NO: 37038 - protein, 15 aa, synthetic construct
MDPATFINMYNRPIH

SEQ ID NO: 37039 - protein, 15 aa, synthetic construct
VRGYLARRRIRLWHR

SEQ ID NO: 37040 - protein, 15 aa, synthetic construct
GYVDVTIDIRSIGVP

SEQ ID NO: 37041 - protein, 15 aa, synthetic construct
LATGMRRKHKISGMI

SEQ ID NO: 37042 - protein, 15 aa, synthetic construct
ATGMRRKHKISGMIL

SEQ ID NO: 37043 - protein, 15 aa, synthetic construct
SSHYGHSSSVSQTFS

SEQ ID NO: 37044 - protein, 15 aa, synthetic construct
YPELVLKAPLDREEQ

SEQ ID NO: 37045 - protein, 15 aa, synthetic construct
KASMGMLRAFLSEVQ

SEQ ID NO: 37046 - protein, 15 aa, synthetic construct
PATFINMYNRPIHIT

SEQ ID NO: 37047 - protein, 15 aa, synthetic construct
DDYVFVTPVEVDSAG

SEQ ID NO: 37048 - protein, 15 aa, synthetic construct
KVVLEAMARDPPNRV

SEQ ID NO: 37049 - protein, 15 aa, synthetic construct
LQCLNSLQKEPDGEG

SEQ ID NO: 37050 - protein, 15 aa, synthetic construct
FLDYVMFTIHMGCHG

SEQ ID NO: 37051 - protein, 15 aa, synthetic construct
KAFKCSSILTTHKRI

SEQ ID NO: 37052 - protein, 15 aa, synthetic construct
QRVVRENKEGCYTNR

SEQ ID NO: 37053 - protein, 15 aa, synthetic construct
GLSSHYGHSSSVSQT

SEQ ID NO: 37054 - protein, 15 aa, synthetic construct
EPGLSSHYGHSSSVS

SEQ ID NO: 37055 - protein, 15 aa, synthetic construct
FGVKIAVVTKRERSK

SEQ ID NO: 37056 - protein, 15 aa, synthetic construct
GYILVYSAKRKASMG

SEQ ID NO: 37057 - protein, 15 aa, synthetic construct
KIAVVTKRERSKVPY

SEQ ID NO: 37058 - protein, 15 aa, synthetic construct
AAKLMAAHITANTNP

SEQ ID NO: 37059 - protein, 15 aa, synthetic construct
VTVMKVEKAPQETYA

SEQ ID NO: 37060 - protein, 15 aa, synthetic construct
LVTVMKVEKAPQETY

SEQ ID NO: 37061 - protein, 15 aa, synthetic construct
LIQRVVRENKEGCYT

SEQ ID NO: 37062 - protein, 15 aa, synthetic construct
LLGLIQRVVRENKEG

SEQ ID NO: 37063 - protein, 15 aa, synthetic construct
LSSHYGHSSSVSQTF

SEQ ID NO: 37064 - protein, 15 aa, synthetic construct
DPTLICSPTHGGLGS

SEQ ID NO: 37065 - protein, 15 aa, synthetic construct
GLIQRVVRENKEGCY

SEQ ID NO: 37066 - protein, 15 aa, synthetic construct
DPATFINMYNRPIHI

SEQ ID NO: 37067 - protein, 15 aa, synthetic construct
NDDYVFVTPVEVDSA

SEQ ID NO: 37068 - protein, 15 aa, synthetic construct
GLNDDYVFVTPVEVD

SEQ ID NO: 37069 - protein, 15 aa, synthetic construct
SSILTTHKRIHTADK

SEQ ID NO: 37070 - protein, 15 aa, synthetic construct
KSPHIRRLSGIRAYF

SEQ ID NO: 37071 - protein, 15 aa, synthetic construct
IQRVVRENKEGCYTN

SEQ ID NO: 37072 - protein, 15 aa, synthetic construct
AQLLGLIQRVVRENK

SEQ ID NO: 37073 - protein, 15 aa, synthetic construct
VKIAVVTKRERSKVP

SEQ ID NO: 37074 - protein, 15 aa, synthetic construct
FKSPHIRRLSGIRAY

SEQ ID NO: 37075 - protein, 15 aa, synthetic construct
LFLDYVMFTIHMGCH

SEQ ID NO: 37076 - protein, 15 aa, synthetic construct
GVKIAVVTKRERSKV

SEQ ID NO: 37077 - protein, 15 aa, synthetic construct
LDYVMFTIHMGCHGF

SEQ ID NO: 37078 - protein, 15 aa, synthetic construct
ILVYSAKRKASMGML

SEQ ID NO: 37079 - protein, 15 aa, synthetic construct
KRKASMGMLRAFLSE

SEQ ID NO: 37080 - protein, 15 aa, synthetic construct
GTKYAAIDPSMVSAE

SEQ ID NO: 37081 - protein, 15 aa, synthetic construct
RKASMGMLRAFLSEV

SEQ ID NO: 37082 - protein, 15 aa, synthetic construct
YILVYSAKRKASMGM

SEQ ID NO: 37083 - protein, 15 aa, synthetic construct
VVLEAMARDPPNRVP

SEQ ID NO: 37084 - protein, 15 aa, synthetic construct
HGTKYAAIDPSMVSA

SEQ ID NO: 37085 - protein, 15 aa, synthetic construct
CLQCLNSLQKEPDGE

SEQ ID NO: 37086 - protein, 15 aa, synthetic construct
CGKAFKCSSILTTHK

SEQ ID NO: 37087 - protein, 15 aa, synthetic construct
LNDDYVFVTPVEVDS

SEQ ID NO: 37088 - protein, 15 aa, synthetic construct
NQCFIQFLSNPAVTF

SEQ ID NO: 37089 - protein, 15 aa, synthetic construct
TNNLMLVTFKSPHIR

SEQ ID NO: 37090 - protein, 15 aa, synthetic construct
GMLRAFLSEVQDTIP

SEQ ID NO: 37091 - protein, 15 aa, synthetic construct
NNLMLVTFKSPHIRR

SEQ ID NO: 37092 - protein, 15 aa, synthetic construct
ASMGMLRAFLSEVQD

SEQ ID NO: 37093 - protein, 15 aa, synthetic construct
QAGVRGYLARRRIRL

SEQ ID NO: 37094 - protein, 15 aa, synthetic construct
FLELNRNFTSLSLDD

SEQ ID NO: 37095 - protein, 15 aa, synthetic construct
SMGMLRAFLSEVQDT

SEQ ID NO: 37096 - protein, 15 aa, synthetic construct
STNNLMLVTFKSPHI

SEQ ID NO: 37097 - protein, 15 aa, synthetic construct
LMLVTFKSPHIRRLS

SEQ ID NO: 37098 - protein, 15 aa, synthetic construct
QCFIQFLSNPAVTFG

SEQ ID NO: 37099 - protein, 15 aa, synthetic construct
RSKVPYIVRQCVEEI

SEQ ID NO: 37100 - protein, 15 aa, synthetic construct
TQVTFYRDGSALGPP

SEQ ID NO: 37101 - protein, 15 aa, synthetic construct
QVTFYRDGSALGPPG

SEQ ID NO: 37102 - protein, 15 aa, synthetic construct
IHLLQFHGTKYAAID

SEQ ID NO: 37103 - protein, 15 aa, synthetic construct
RERSKVPYIVRQCVE

SEQ ID NO: 37104 - protein, 15 aa, synthetic construct
CFIQFLSNPAVTFGT

SEQ ID NO: 37105 - protein, 15 aa, synthetic construct
LTQVTFYRDGSALGP

SEQ ID NO: 37106 - protein, 15 aa, synthetic construct
SETPLQLAAAVGVPW

SEQ ID NO: 37107 - protein, 15 aa, synthetic construct
WPLTQVTFYRDGSAL

SEQ ID NO: 37108 - protein, 15 aa, synthetic construct
ETPLQLAAAVGVPWT

SEQ ID NO: 37109 - protein, 15 aa, synthetic construct
PLTQVTFYRDGSALG

SEQ ID NO: 37110 - protein, 15 aa, synthetic construct
MRPIKTEPGLSSHYG

SEQ ID NO: 37111 - protein, 15 aa, synthetic construct
GHEAAKLMAAHITAN

SEQ ID NO: 37112 - protein, 15 aa, synthetic construct
KRERSKVPYIVRQCV

SEQ ID NO: 37113 - protein, 15 aa, synthetic construct
DWPLTQVTFYRDGSA

SEQ ID NO: 37114 - protein, 15 aa, synthetic construct
MLVTFKSPHIRRLSG

SEQ ID NO: 37115 - protein, 15 aa, synthetic construct
LELNRNFTSLSLDDS

SEQ ID NO: 37116 - protein, 15 aa, synthetic construct
TFKSPHIRRLSGIRA

SEQ ID NO: 37117 - protein, 15 aa, synthetic construct
IQAGVRGYLARRRIR

SEQ ID NO: 37118 - protein, 15 aa, synthetic construct
ATFINMYNRPIHITL

SEQ ID NO: 37119 - protein, 15 aa, synthetic construct
GNDLFREKDYKQALV

SEQ ID NO: 37120 - protein, 15 aa, synthetic construct
NLMLVTFKSPHIRRL

SEQ ID NO: 37121 - protein, 15 aa, synthetic construct
YADIGGLDNQIQEIK

SEQ ID NO: 37122 - protein, 15 aa, synthetic construct
DNQCFIQFLSNPAVT

SEQ ID NO: 37123 - protein, 15 aa, synthetic construct
QIHLLQFHGTKYAAI

SEQ ID NO: 37124 - protein, 15 aa, synthetic construct
MGMLRAFLSEVQDTI

SEQ ID NO: 37125 - protein, 15 aa, synthetic construct
ERSKVPYIVRQCVEE

SEQ ID NO: 37126 - protein, 15 aa, synthetic construct
YVQIHLLQFHGTKYA

SEQ ID NO: 37127 - protein, 15 aa, synthetic construct
VQIHLLQFHGTKYAA

SEQ ID NO: 37128 - protein, 15 aa, synthetic construct
REKDYKQALVQYMEG

SEQ ID NO: 37129 - protein, 15 aa, synthetic construct
HLLQFHGTKYAAIDP

SEQ ID NO: 37130 - protein, 15 aa, synthetic construct
NDGSWHSVFLELNRN

SEQ ID NO: 37131 - protein, 15 aa, synthetic construct
KAPQETYADIGGLDN

SEQ ID NO: 37132 - protein, 15 aa, synthetic construct
SNPAVTFGTAIAAFY

SEQ ID NO: 37133 - protein, 15 aa, synthetic construct
AKTIFTGHTAVVEDV

SEQ ID NO: 37134 - protein, 15 aa, synthetic construct
DGSWHSVFLELNRNF

SEQ ID NO: 37135 - protein, 15 aa, synthetic construct
YDPTLICSPTHGGLG

SEQ ID NO: 37136 - protein, 15 aa, synthetic construct
AGPGTGAQPLWGVRS

SEQ ID NO: 37137 - protein, 15 aa, synthetic construct
EKDYKQALVQYMEGL

SEQ ID NO: 37138 - protein, 15 aa, synthetic construct
DAKTIFTGHTAVVED

SEQ ID NO: 37139 - protein, 15 aa, synthetic construct
LEAMARDPPNRVPPT

SEQ ID NO: 37140 - protein, 15 aa, synthetic construct
KTIFTGHTAVVEDVS

SEQ ID NO: 37141 - protein, 15 aa, synthetic construct
TIFTGHTAVVEDVSW

SEQ ID NO: 37142 - protein, 15 aa, synthetic construct
TYADIGGLDNQIQEI

SEQ ID NO: 37143 - protein, 15 aa, synthetic construct
SGTLSFTSAEDDEDD

SEQ ID NO: 37144 - protein, 15 aa, synthetic construct
LSGTLSFTSAEDDED

SEQ ID NO: 37145 - protein, 15 aa, synthetic construct
LLQFHGTKYAAIDPS

SEQ ID NO: 37146 - protein, 15 aa, synthetic construct
LSFTSAEDDEDDEDE

SEQ ID NO: 37147 - protein, 15 aa, synthetic construct
GDGTSGEDAERSPPP

SEQ ID NO: 37148 - protein, 15 aa, synthetic construct
TPVEVDSAGSYISHD

SEQ ID NO: 37149 - protein, 15 aa, synthetic construct
IFTGHTAVVEDVSWH

SEQ ID NO: 37150 - protein, 15 aa, synthetic construct
DTGDTGASPPPPAGP

SEQ ID NO: 37151 - protein, 15 aa, synthetic construct
QFHGTKYAAIDPSMV

SEQ ID NO: 37152 - protein, 15 aa, synthetic construct
SHYGHSSSVSQTFSV

SEQ ID NO: 37153 - protein, 15 aa, synthetic construct
ETYADIGGLDNQIQE

SEQ ID NO: 37154 - protein, 15 aa, synthetic construct
LMAAHITANTNPFSW

SEQ ID NO: 37155 - protein, 15 aa, synthetic construct
SFTSAEDDEDDEDED

SEQ ID NO: 37156 - protein, 15 aa, synthetic construct
QPLWGVRSGSGHRQL

SEQ ID NO: 37157 - protein, 15 aa, synthetic construct
GEAAASPEAEQFPES

SEQ ID NO: 37158 - protein, 15 aa, synthetic construct
KLMAAHITANTNPFS

SEQ ID NO: 37159 - protein, 15 aa, synthetic construct
RPGASRSGGLEESRD

SEQ ID NO: 37160 - protein, 15 aa, synthetic construct
AKLMAAHITANTNPF

SEQ ID NO: 37161 - protein, 15 aa, synthetic construct
LGDGTSGEDAERSPP

SEQ ID NO: 37162 - protein, 15 aa, synthetic construct
AQPLWGVRSGSGHRQ

SEQ ID NO: 37163 - protein, 15 aa, synthetic construct
GGKARAKAKTRSSRA

SEQ ID NO: 37164 - protein, 15 aa, synthetic construct
VDAKTIFTGHTAVVE

SEQ ID NO: 37165 - protein, 15 aa, synthetic construct
LQFHGTKYAAIDPSM

SEQ ID NO: 37166 - protein, 15 aa, synthetic construct
VLEAMARDPPNRVPP

SEQ ID NO: 37167 - protein, 15 aa, synthetic construct
GAQPLWGVRSGSGHR

SEQ ID NO: 37168 - protein, 15 aa, synthetic construct
VTFYRDGSALGPPGP

SEQ ID NO: 37169 - protein, 15 aa, synthetic construct
EAAKLMAAHITANTN

SEQ ID NO: 37170 - protein, 15 aa, synthetic construct
TLSFTSAEDDEDDED

SEQ ID NO: 37171 - protein, 15 aa, synthetic construct
GTLSFTSAEDDEDDE

SEQ ID NO: 37172 - protein, 15 aa, synthetic construct
FHGTKYAAIDPSMVS

SEQ ID NO: 37173 - protein, 15 aa, synthetic construct
GTKGHEAAKLMAAHI

SEQ ID NO: 37174 - protein, 15 aa, synthetic construct
CQENSDEAKAPQTPS

SEQ ID NO: 37175 - protein, 15 aa, synthetic construct
FINMYNRPIHITLDS

SEQ ID NO: 37176 - protein, 15 aa, synthetic construct
MKMGSLERKKLRYSD

SEQ ID NO: 37177 - protein, 15 aa, synthetic construct
TKGHEAAKLMAAHIT

SEQ ID NO: 37178 - protein, 15 aa, synthetic construct
GSLERKKLRYSDLDF

SEQ ID NO: 37179 - protein, 15 aa, synthetic construct
GPGTGAQPLWGVRSG

SEQ ID NO: 37180 - protein, 15 aa, synthetic construct
INMYNRPIHITLDSE

SEQ ID NO: 37181 - protein, 15 aa, synthetic construct
HEAAKLMAAHITANT

SEQ ID NO: 37182 - protein, 15 aa, synthetic construct
QDWPLTQVTFYRDGS

SEQ ID NO: 37183 - protein, 15 aa, synthetic construct
EAKAPQTPSALLGQK

SEQ ID NO: 37184 - protein, 15 aa, synthetic construct
MGSLERKKLRYSDLD

SEQ ID NO: 37185 - protein, 15 aa, synthetic construct
NYSETPLQLAAAVGV

SEQ ID NO: 37186 - protein, 15 aa, synthetic construct
KMGSLERKKLRYSDL

SEQ ID NO: 37187 - protein, 15 aa, synthetic construct
APQTPSALLGQKSNT

SEQ ID NO: 37188 - protein, 15 aa, synthetic construct
QENSDEAKAPQTPSA

SEQ ID NO: 37189 - protein, 15 aa, synthetic construct
RAGPGTGAQPLWGVR

SEQ ID NO: 37190 - protein, 15 aa, synthetic construct
SRLSGTLSFTSAEDD

SEQ ID NO: 37191 - protein, 15 aa, synthetic construct
AKAPQTPSALLGQKS

SEQ ID NO: 37192 - protein, 15 aa, synthetic construct
WQDWPLTQVTFYRDG

SEQ ID NO: 37193 - protein, 15 aa, synthetic construct
KAPQTPSALLGQKSN

SEQ ID NO: 37194 - protein, 15 aa, synthetic construct
SQRSPEGGGGAGARG

SEQ ID NO: 37195 - protein, 15 aa, synthetic construct
VPGSTMKMGSLERKK

SEQ ID NO: 37196 - protein, 15 aa, synthetic construct
RSQRSPEGGGGAGAR

SEQ ID NO: 37197 - protein, 15 aa, synthetic construct
VKDIPRSATSYTLSL

SEQ ID NO: 37198 - protein, 15 aa, synthetic construct
DGTSGEDAERSPPPD

SEQ ID NO: 37199 - protein, 15 aa, synthetic construct
GRSQRSPEGGGGAGA

SEQ ID NO: 37200 - protein, 15 aa, synthetic construct
GSTMKMGSLERKKLR

SEQ ID NO: 37201 - protein, 15 aa, synthetic construct
VVDAKTIFTGHTAVV

SEQ ID NO: 37202 - protein, 15 aa, synthetic construct
ITIQAGVRGYLARRR

SEQ ID NO: 37203 - protein, 15 aa, synthetic construct
AVITIQAGVRGYLAR

SEQ ID NO: 37204 - protein, 15 aa, synthetic construct
FREKDYKQALVQYME

SEQ ID NO: 37205 - protein, 15 aa, synthetic construct
FVTPVEVDSAGSYIS

SEQ ID NO: 37206 - protein, 15 aa, synthetic construct
VTPVEVDSAGSYISH

SEQ ID NO: 37207 - protein, 15 aa, synthetic construct
FIQFLSNPAVTFGTA

SEQ ID NO: 37208 - protein, 15 aa, synthetic construct
FLSNPAVTFGTAIAA

SEQ ID NO: 37209 - protein, 15 aa, synthetic construct
QFLSNPAVTFGTAIA

SEQ ID NO: 37210 - protein, 15 aa, synthetic construct
KDIPRSATSYTLSLD

SEQ ID NO: 37211 - protein, 15 aa, synthetic construct
TFYRDGSALGPPGPN

SEQ ID NO: 37212 - protein, 15 aa, synthetic construct
GSWHSVFLELNRNFT

SEQ ID NO: 37213 - protein, 15 aa, synthetic construct
LSNPAVTFGTAIAAF

SEQ ID NO: 37214 - protein, 15 aa, synthetic construct
AVNDGSWHSVFLELN

SEQ ID NO: 37215 - protein, 15 aa, synthetic construct
LAVITIQAGVRGYLA

SEQ ID NO: 37216 - protein, 15 aa, synthetic construct
YSETPLQLAAAVGVP

SEQ ID NO: 37217 - protein, 15 aa, synthetic construct
RSPEGGGGAGARGGA

SEQ ID NO: 37218 - protein, 15 aa, synthetic construct
QRSPEGGGGAGARGG

SEQ ID NO: 37219 - protein, 15 aa, synthetic construct
EQFPESSELEDDDAE

SEQ ID NO: 37220 - protein, 15 aa, synthetic construct
PGSTMKMGSLERKKL

SEQ ID NO: 37221 - protein, 15 aa, synthetic construct
FVKDIPRSATSYTLS

SEQ ID NO: 37222 - protein, 15 aa, synthetic construct
IQFLSNPAVTFGTAI

SEQ ID NO: 37223 - protein, 15 aa, synthetic construct
VITIQAGVRGYLARR

SEQ ID NO: 37224 - protein, 15 aa, synthetic construct
VNDGSWHSVFLELNR

SEQ ID NO: 37225 - protein, 15 aa, synthetic construct
DRTLYNGHSGYNPAT

SEQ ID NO: 37226 - protein, 15 aa, synthetic construct
VTKRERSKVPYIVRQ

SEQ ID NO: 37227 - protein, 15 aa, synthetic construct
QGGKARAKAKTRSSR

SEQ ID NO: 37228 - protein, 15 aa, synthetic construct
VVTKRERSKVPYIVR

SEQ ID NO: 37229 - protein, 15 aa, synthetic construct
VFVTPVEVDSAGSYI

SEQ ID NO: 37230 - protein, 15 aa, synthetic construct
TKYAAIDPSMVSAEE

SEQ ID NO: 37231 - protein, 15 aa, synthetic construct
KGHEAAKLMAAHITA

SEQ ID NO: 37232 - protein, 15 aa, synthetic construct
DYVFVTPVEVDSAGS

SEQ ID NO: 37233 - protein, 15 aa, synthetic construct
YVFVTPVEVDSAGSY

SEQ ID NO: 37234 - protein, 15 aa, synthetic construct
KLALCWARALPSRPG

SEQ ID NO: 37235 - protein, 9 aa, synthetic construct
RLEKEWEAL

SEQ ID NO: 37236 - protein, 10 aa, synthetic construct
SLTSALHYLV

SEQ ID NO: 37237 - protein, 9 aa, synthetic construct
FLWQPKREC

SEQ ID NO: 37238 - protein, 11 aa, synthetic construct
TLMDHWVFGEA

SEQ ID NO: 37239 - protein, 9 aa, synthetic construct
ILPNCVSSV

SEQ ID NO: 37240 - protein, 9 aa, synthetic construct
KLFIPQITT

SEQ ID NO: 37241 - protein, 9 aa, synthetic construct
LTSALHYLV

SEQ ID NO: 37242 - protein, 11 aa, synthetic construct
AHSLTSALHYL

SEQ ID NO: 37243 - protein, 9 aa, synthetic construct
NLSKDHYML

SEQ ID NO: 37244 - protein, 10 aa, synthetic construct
HSLTSALHYL

SEQ ID NO: 37245 - protein, 10 aa, synthetic construct
GTDEPRDITV

SEQ ID NO: 37246 - protein, 9 aa, synthetic construct
SLTSALHYL

SEQ ID NO: 37247 - protein, 9 aa, synthetic construct
CVIEHTNPA

SEQ ID NO: 37248 - protein, 9 aa, synthetic construct
YTFTISQSV

SEQ ID NO: 37249 - protein, 9 aa, synthetic construct
HSLTSALHY

SEQ ID NO: 37250 - protein, 9 aa, synthetic construct
CVSSVYLYY

SEQ ID NO: 37251 - protein, 11 aa, synthetic construct
ELIKNTQTYTF

SEQ ID NO: 37252 - protein, 10 aa, synthetic construct
CVIEHTNPAF

SEQ ID NO: 37253 - protein, 10 aa, synthetic construct
VHEIEVIGGY

SEQ ID NO: 37254 - protein, 9 aa, synthetic construct
SSVHDIEGF

SEQ ID NO: 37255 - protein, 9 aa, synthetic construct
DTRPRFLWQ

SEQ ID NO: 37256 - protein, 9 aa, synthetic construct
NCVSSVYLY

SEQ ID NO: 37257 - protein, 10 aa, synthetic construct
NCVSSVYLYY

SEQ ID NO: 37258 - protein, 9 aa, synthetic construct
LPNCVSSVY

SEQ ID NO: 37259 - protein, 9 aa, synthetic construct
HEIEVIGGY

SEQ ID NO: 37260 - protein, 9 aa, synthetic construct
EASEVSRNR

SEQ ID NO: 37261 - protein, 11 aa, synthetic construct
TVHEIEVIGGY

SEQ ID NO: 37262 - protein, 10 aa, synthetic construct
QITTKHSGLY

SEQ ID NO: 37263 - protein, 9 aa, synthetic construct
GIQGEEGAY

SEQ ID NO: 37264 - protein, 9 aa, synthetic construct
FIMSNSGDY

SEQ ID NO: 37265 - protein, 9 aa, synthetic construct
ATNWNFLFF

SEQ ID NO: 37266 - protein, 10 aa, synthetic construct
DILPNCVSSV

SEQ ID NO: 37267 - protein, 11 aa, synthetic construct
DILPNCVSSVY

SEQ ID NO: 37268 - protein, 10 aa, synthetic construct
VVYFTALFPY

SEQ ID NO: 37269 - protein, 8 aa, synthetic construct
VVYFTALF

SEQ ID NO: 37270 - protein, 9 aa, synthetic construct
FVYTLMDHW

SEQ ID NO: 37271 - protein, 8 aa, synthetic construct
TTKHSGLY

SEQ ID NO: 37272 - protein, 9 aa, synthetic construct
GMANRGPAY

SEQ ID NO: 37273 - protein, 9 aa, synthetic construct
NSGDYEILY

SEQ ID NO: 37274 - protein, 9 aa, synthetic construct
KNNVAFMSY

SEQ ID NO: 37275 - protein, 11 aa, synthetic construct
YAHSLTSALHY

SEQ ID NO: 37276 - protein, 9 aa, synthetic construct
NNVAFMSYF

SEQ ID NO: 37277 - protein, 11 aa, synthetic construct
DQGIQGEEGAY

SEQ ID NO: 37278 - protein, 9 aa, synthetic construct
FATNWNFLF

SEQ ID NO: 37279 - protein, 9 aa, synthetic construct
YAHSLTSAL

SEQ ID NO: 37280 - protein, 10 aa, synthetic construct
SNSGDYEILY

SEQ ID NO: 37281 - protein, 10 aa, synthetic construct
ILPNCVSSVY

SEQ ID NO: 37282 - protein, 9 aa, synthetic construct
FIPQITTKH

SEQ ID NO: 37283 - protein, 9 aa, synthetic construct
RIVAVPTPL

SEQ ID NO: 37284 - protein, 8 aa, synthetic construct
MANRGPAY

SEQ ID NO: 37285 - protein, 8 aa, synthetic construct
SLTSALHY

SEQ ID NO: 37286 - protein, 9 aa, synthetic construct
KSSGKVVYF

SEQ ID NO: 37287 - protein, 9 aa, synthetic construct
VIEHTNPAF

SEQ ID NO: 37288 - protein, 10 aa, synthetic construct
KRIHTGEKPY

SEQ ID NO: 37289 - protein, 11 aa, synthetic construct
FLWQPKRECHF

SEQ ID NO: 37290 - protein, 10 aa, synthetic construct
GIKSSGKVVY

SEQ ID NO: 37291 - protein, 11 aa, synthetic construct
GIKSSGKVVYF

SEQ ID NO: 37292 - protein, 9 aa, synthetic construct
WQPKRECHF

SEQ ID NO: 37293 - protein, 9 aa, synthetic construct
SQVECTGAR

SEQ ID NO: 37294 - protein, 9 aa, synthetic construct
IKSSGKVVY

SEQ ID NO: 37295 - protein, 10 aa, synthetic construct
IGMANRGPAY

SEQ ID NO: 37296 - protein, 11 aa, synthetic construct
AERDGKNNVAF

SEQ ID NO: 37297 - protein, 10 aa, synthetic construct
LIKNTQTYTF

SEQ ID NO: 37298 - protein, 9 aa, synthetic construct
IKNTQTYTF

SEQ ID NO: 37299 - protein, 9 aa, synthetic construct
VLQKHIRTH

SEQ ID NO: 37300 - protein, 10 aa, synthetic construct
VIEHTNPAFF

SEQ ID NO: 37301 - protein, 10 aa, synthetic construct
EAEEGSKLKI

SEQ ID NO: 37302 - protein, 9 aa, synthetic construct
HEAEEGSKL

SEQ ID NO: 37303 - protein, 11 aa, synthetic construct
LVGEKSVTQRW

SEQ ID NO: 37304 - protein, 9 aa, synthetic construct
KVVYFTALF

SEQ ID NO: 37305 - protein, 11 aa, synthetic construct
HEAEEGSKLKI

SEQ ID NO: 37306 - protein, 10 aa, synthetic construct
VHEAEEGSKL

SEQ ID NO: 37307 - protein, 10 aa, synthetic construct
AEEGSKLKIL

SEQ ID NO: 37308 - protein, 10 aa, synthetic construct
SERYGPVFTI

SEQ ID NO: 37309 - protein, 9 aa, synthetic construct
RDGKNNVAF

SEQ ID NO: 37310 - protein, 11 aa, synthetic construct
SGKVVYFTALF

SEQ ID NO: 37311 - protein, 8 aa, synthetic construct
IEAEPEAL

SEQ ID NO: 37312 - protein, 9 aa, synthetic construct
DEPRDITVL

SEQ ID NO: 37313 - protein, 10 aa, synthetic construct
GKVVYFTALF

SEQ ID NO: 37314 - protein, 9 aa, synthetic construct
AERDGKNNV

SEQ ID NO: 37315 - protein, 10 aa, synthetic construct
HEIEVIGGYL

SEQ ID NO: 37316 - protein, 9 aa, synthetic construct
NKNRLEKEW

SEQ ID NO: 37317 - protein, 9 aa, synthetic construct
AEEGSKLKI

SEQ ID NO: 37318 - protein, 10 aa, synthetic construct
EKEWEALCAY

SEQ ID NO: 37319 - protein, 8 aa, synthetic construct
SERYGPVF

SEQ ID NO: 37320 - protein, 11 aa, synthetic construct
KVVYFTALFPY

SEQ ID NO: 37321 - protein, 8 aa, synthetic construct
GTDEPRDI

SEQ ID NO: 37322 - protein, 9 aa, synthetic construct
GTDEPRDIT

SEQ ID NO: 37323 - protein, 11 aa, synthetic construct
KGDYNDSVQVV

SEQ ID NO: 37324 - protein, 9 aa, synthetic construct
ISERYGPVF

SEQ ID NO: 37325 - protein, 9 aa, synthetic construct
MSNSGDYEI

SEQ ID NO: 37326 - protein, 9 aa, synthetic construct
FGAVTNVKV

SEQ ID NO: 37327 - protein, 11 aa, synthetic construct
GTDEPRDITVL

SEQ ID NO: 37328 - protein, 9 aa, synthetic construct
YGPVFTIHL

SEQ ID NO: 37329 - protein, 9 aa, synthetic construct
NNDLTSSNL

SEQ ID NO: 37330 - protein, 9 aa, synthetic construct
KRYPTVHEI

SEQ ID NO: 37331 - protein, 9 aa, synthetic construct
LSKDHYMLI

SEQ ID NO: 37332 - protein, 8 aa, synthetic construct
LSKDHYML

SEQ ID NO: 37333 - protein, 8 aa, synthetic construct
VSSVYLYY

SEQ ID NO: 37334 - protein, 9 aa, synthetic construct
GAVTNVKVI

SEQ ID NO: 37335 - protein, 8 aa, synthetic construct
FTFVYTLM

SEQ ID NO: 37336 - protein, 8 aa, synthetic construct
RASSVHDI

SEQ ID NO: 37337 - protein, 9 aa, synthetic construct
YTLMDHWVF

SEQ ID NO: 37338 - protein, 9 aa, synthetic construct
ANRGPAYGL

SEQ ID NO: 37339 - protein, 9 aa, synthetic construct
SASVLQKHI

SEQ ID NO: 37340 - protein, 9 aa, synthetic construct
KAFRSASVL

SEQ ID NO: 37341 - protein, 15 aa, synthetic construct
RGRHLVLLDTAQAAA

SEQ ID NO: 37342 - protein, 15 aa, synthetic construct
PRFLWQPKRECHFFN

SEQ ID NO: 37343 - protein, 15 aa, synthetic construct
KAFRSASVLQKHIRT

SEQ ID NO: 37344 - protein, 15 aa, synthetic construct
LTSALHYLVPVRPRR

SEQ ID NO: 37345 - protein, 15 aa, synthetic construct
GNFDGIQNNDLTSSN

SEQ ID NO: 37346 - protein, 15 aa, synthetic construct
VHEIEVIGGYLALQK

SEQ ID NO: 37347 - protein, 15 aa, synthetic construct
DSLLAEGAGLGGGDV

SEQ ID NO: 37348 - protein, 15 aa, synthetic construct
EGSKLKILGPFSNFF

SEQ ID NO: 37349 - protein, 15 aa, synthetic construct
QCGKAFRSASVLQKH

SEQ ID NO: 37350 - protein, 15 aa, synthetic construct
EGKFQNPYAHSLTSA

SEQ ID NO: 37351 - protein, 15 aa, synthetic construct
SLTSALHYLVPVRPR

SEQ ID NO: 37352 - protein, 15 aa, synthetic construct
GPFGAVTNVKVIRDF

SEQ ID NO: 37353 - protein, 15 aa, synthetic construct
LEKEWEALCAYQAEP

SEQ ID NO: 37354 - protein, 15 aa, synthetic construct
RPRFLWQPKRECHFF

SEQ ID NO: 37355 - protein, 15 aa, synthetic construct
GRHLVLLDTAQAAAA

SEQ ID NO: 37356 - protein, 15 aa, synthetic construct
GQKLFIPQITTKHSG

SEQ ID NO: 37357 - protein, 15 aa, synthetic construct
ESVLWQLFGPFGAVT

SEQ ID NO: 37358 - protein, 15 aa, synthetic construct
HLVLLDTAQAAAAGH

SEQ ID NO: 37359 - protein, 15 aa, synthetic construct
LRSYSAGEASEVSRN

SEQ ID NO: 37360 - protein, 15 aa, synthetic construct
RDITVLRNRQVTLEC

SEQ ID NO: 37361 - protein, 15 aa, synthetic construct
QTYTFTISQSVLVTN

SEQ ID NO: 37362 - protein, 15 aa, synthetic construct
RHLVLLDTAQAAAAG

SEQ ID NO: 37363 - protein, 15 aa, synthetic construct
QKLFIPQITTKHSGL

SEQ ID NO: 37364 - protein, 15 aa, synthetic construct
VVYFTALFPYVVLLI

SEQ ID NO: 37365 - protein, 15 aa, synthetic construct
CGKAFRSASVLQKHI

SEQ ID NO: 37366 - protein, 15 aa, synthetic construct
LQRLRSYSAGEASEV

SEQ ID NO: 37367 - protein, 15 aa, synthetic construct
HLQRLRSYSAGEASE

SEQ ID NO: 37368 - protein, 15 aa, synthetic construct
KISERYGPVFTIHLG

SEQ ID NO: 37369 - protein, 15 aa, synthetic construct
RASQVECTGARIVAV

SEQ ID NO: 37370 - protein, 15 aa, synthetic construct
MDSLLAEGAGLGGGD

SEQ ID NO: 37371 - protein, 15 aa, synthetic construct
SSVHDIEGFGVHPKN

SEQ ID NO: 37372 - protein, 15 aa, synthetic construct
SVLWQLFGPFGAVTN

SEQ ID NO: 37373 - protein, 15 aa, synthetic construct
LFGPFGAVTNVKVIR

SEQ ID NO: 37374 - protein, 15 aa, synthetic construct
TVHEIEVIGGYLALQ

SEQ ID NO: 37375 - protein, 15 aa, synthetic construct
RRASSVHDIEGFGVH

SEQ ID NO: 37376 - protein, 15 aa, synthetic construct
SMDSLLAEGAGLGGG

SEQ ID NO: 37377 - protein, 15 aa, synthetic construct
ERYGPVFTIHLGPRR

SEQ ID NO: 37378 - protein, 15 aa, synthetic construct
SERYGPVFTIHLGPR

SEQ ID NO: 37379 - protein, 15 aa, synthetic construct
RSYSAGEASEVSRNR

SEQ ID NO: 37380 - protein, 15 aa, synthetic construct
DEPRDITVLRNRQVT

SEQ ID NO: 37381 - protein, 15 aa, synthetic construct
TRPRFLWQPKRECHF

SEQ ID NO: 37382 - protein, 15 aa, synthetic construct
ISERYGPVFTIHLGP

SEQ ID NO: 37383 - protein, 15 aa, synthetic construct
VLLDTAQAAAAGHRL

SEQ ID NO: 37384 - protein, 15 aa, synthetic construct
TQTYTFTISQSVLVT

SEQ ID NO: 37385 - protein, 15 aa, synthetic construct
SGKVVYFTALFPYVV

SEQ ID NO: 37386 - protein, 15 aa, synthetic construct
PFGAVTNVKVIRDFT

SEQ ID NO: 37387 - protein, 15 aa, synthetic construct
CGNFDGIQNNDLTSS

SEQ ID NO: 37388 - protein, 15 aa, synthetic construct
RLRSYSAGEASEVSR

SEQ ID NO: 37389 - protein, 15 aa, synthetic construct
LVLLDTAQAAAAGHR

SEQ ID NO: 37390 - protein, 15 aa, synthetic construct
RASSVHDIEGFGVHP

SEQ ID NO: 37391 - protein, 15 aa, synthetic construct
ASSVHDIEGFGVHPK

SEQ ID NO: 37392 - protein, 15 aa, synthetic construct
PTVHEIEVIGGYLAL

SEQ ID NO: 37393 - protein, 15 aa, synthetic construct
HEIEVIGGYLALQKS

SEQ ID NO: 37394 - protein, 15 aa, synthetic construct
EPRDITVLRNRQVTL

SEQ ID NO: 37395 - protein, 15 aa, synthetic construct
YTFTISQSVLVTNLK

SEQ ID NO: 37396 - protein, 15 aa, synthetic construct
QLFGPFGAVTNVKVI

SEQ ID NO: 37397 - protein, 15 aa, synthetic construct
GKAFRSASVLQKHIR

SEQ ID NO: 37398 - protein, 15 aa, synthetic construct
ASQVECTGARIVAVP

SEQ ID NO: 37399 - protein, 15 aa, synthetic construct
TYTFTISQSVLVTNL

SEQ ID NO: 37400 - protein, 15 aa, synthetic construct
PRDITVLRNRQVTLE

SEQ ID NO: 37401 - protein, 15 aa, synthetic construct
RYGPVFTIHLGPRRV

SEQ ID NO: 37402 - protein, 15 aa, synthetic construct
NRLEKEWEALCAYQA

SEQ ID NO: 37403 - protein, 15 aa, synthetic construct
DTRPRFLWQPKRECH

SEQ ID NO: 37404 - protein, 15 aa, synthetic construct
FGPFGAVTNVKVIRD

SEQ ID NO: 37405 - protein, 15 aa, synthetic construct
VRGRHLVLLDTAQAA

SEQ ID NO: 37406 - protein, 15 aa, synthetic construct
EKEWEALCAYQAEPN

SEQ ID NO: 37407 - protein, 15 aa, synthetic construct
GKVVYFTALFPYVVL

SEQ ID NO: 37408 - protein, 15 aa, synthetic construct
QRLRSYSAGEASEVS

SEQ ID NO: 37409 - protein, 15 aa, synthetic construct
TSALHYLVPVRPRRQ

SEQ ID NO: 37410 - protein, 15 aa, synthetic construct
RLEKEWEALCAYQAE

SEQ ID NO: 37411 - protein, 15 aa, synthetic construct
KVVYFTALFPYVVLL

SEQ ID NO: 37412 - protein, 15 aa, synthetic construct
SASVLQKHIRTHTGE

SEQ ID NO: 37413 - protein, 15 aa, synthetic construct
ALFKGIKSSGKVVYF

SEQ ID NO: 37414 - protein, 15 aa, synthetic construct
KGIKSSGKVVYFTAL

SEQ ID NO: 37415 - protein, 15 aa, synthetic construct
FKGIKSSGKVVYFTA

SEQ ID NO: 37416 - protein, 15 aa, synthetic construct
MEDHLKNKNRLEKEW

SEQ ID NO: 37417 - protein, 15 aa, synthetic construct
DIEGFGVHPKNIFRD

SEQ ID NO: 37418 - protein, 15 aa, synthetic construct
VEALRFVKRHCKRCV

SEQ ID NO: 37419 - protein, 15 aa, synthetic construct
HDIEGFGVHPKNIFR

SEQ ID NO: 37420 - protein, 15 aa, synthetic construct
IPQITTKHSGLYACS

SEQ ID NO: 37421 - protein, 15 aa, synthetic construct
PVFTIHLGPRRVVVL

SEQ ID NO: 37422 - protein, 15 aa, synthetic construct
GKAFILSSTLSKHKR

SEQ ID NO: 37423 - protein, 15 aa, synthetic construct
TNVKVIRDFTTNKCK

SEQ ID NO: 37424 - protein, 15 aa, synthetic construct
PPPIGMANRGPAYGL

SEQ ID NO: 37425 - protein, 15 aa, synthetic construct
HYMLIVKVSDGKFYS

SEQ ID NO: 37426 - protein, 15 aa, synthetic construct
LFKGIKSSGKVVYFT

SEQ ID NO: 37427 - protein, 15 aa, synthetic construct
LFIPQITTKHSGLYA

SEQ ID NO: 37428 - protein, 15 aa, synthetic construct
YMEDHLKNKNRLEKE

SEQ ID NO: 37429 - protein, 15 aa, synthetic construct
SKDHYMLIVKVSDGK

SEQ ID NO: 37430 - protein, 15 aa, synthetic construct
FIPQITTKHSGLYAC

SEQ ID NO: 37431 - protein, 15 aa, synthetic construct
SYMEDHLKNKNRLEK

SEQ ID NO: 37432 - protein, 15 aa, synthetic construct
PQITTKHSGLYACSV

SEQ ID NO: 37433 - protein, 15 aa, synthetic construct
SVLQKHIRTHTGEKP

SEQ ID NO: 37434 - protein, 15 aa, synthetic construct
ASVLQKHIRTHTGEK

SEQ ID NO: 37435 - protein, 15 aa, synthetic construct
AVTNVKVIRDFTTNK

SEQ ID NO: 37436 - protein, 15 aa, synthetic construct
EDHLKNKNRLEKEWE

SEQ ID NO: 37437 - protein, 15 aa, synthetic construct
DHLKNKNRLEKEWEA

SEQ ID NO: 37438 - protein, 15 aa, synthetic construct
VHDIEGFGVHPKNIF

SEQ ID NO: 37439 - protein, 15 aa, synthetic construct
KDHYMLIVKVSDGKF

SEQ ID NO: 37440 - protein, 15 aa, synthetic construct
PPPPIGMANRGPAYG

SEQ ID NO: 37441 - protein, 15 aa, synthetic construct
SVHDIEGFGVHPKNI

SEQ ID NO: 37442 - protein, 15 aa, synthetic construct
GPVFTIHLGPRRVVV

SEQ ID NO: 37443 - protein, 15 aa, synthetic construct
QPPPPIGMANRGPAY

SEQ ID NO: 37444 - protein, 15 aa, synthetic construct
TDEPRDITVLRNRQV

SEQ ID NO: 37445 - protein, 15 aa, synthetic construct
YGPVFTIHLGPRRVV

SEQ ID NO: 37446 - protein, 15 aa, synthetic construct
CVSSVYLYYDPDYSF

SEQ ID NO: 37447 - protein, 15 aa, synthetic construct
SSVYLYYDPDYSFLS

SEQ ID NO: 37448 - protein, 15 aa, synthetic construct
SVYLYYDPDYSFLSL

SEQ ID NO: 37449 - protein, 15 aa, synthetic construct
PNCVSSVYLYYDPDY

SEQ ID NO: 37450 - protein, 15 aa, synthetic construct
RDFHFSMDSLLAEGA

SEQ ID NO: 37451 - protein, 15 aa, synthetic construct
NCVSSVYLYYDPDYS

SEQ ID NO: 37452 - protein, 15 aa, synthetic construct
VTNVKVIRDFTTNKC

SEQ ID NO: 37453 - protein, 15 aa, synthetic construct
MDNDIVQGAEDQGIQ

SEQ ID NO: 37454 - protein, 15 aa, synthetic construct
DGKNNVAFMSYFLQG

SEQ ID NO: 37455 - protein, 15 aa, synthetic construct
LPNCVSSVYLYYDPD

SEQ ID NO: 37456 - protein, 15 aa, synthetic construct
NSGDYEILYWDVAGG

SEQ ID NO: 37457 - protein, 15 aa, synthetic construct
GAVTNVKVIRDFTTN

SEQ ID NO: 37458 - protein, 15 aa, synthetic construct
TSSNLQVEEDPVDFG

SEQ ID NO: 37459 - protein, 15 aa, synthetic construct
KNNVAFMSYFLQGKV

SEQ ID NO: 37460 - protein, 15 aa, synthetic construct
GKNNVAFMSYFLQGK

SEQ ID NO: 37461 - protein, 15 aa, synthetic construct
DNDIVQGAEDQGIQG

SEQ ID NO: 37462 - protein, 15 aa, synthetic construct
PFTFVYTLMDHWVFG

SEQ ID NO: 37463 - protein, 15 aa, synthetic construct
SSNLQVEEDPVDFGN

SEQ ID NO: 37464 - protein, 15 aa, synthetic construct
VSSVYLYYDPDYSFL

SEQ ID NO: 37465 - protein, 15 aa, synthetic construct
TFVYTLMDHWVFGEA

SEQ ID NO: 37466 - protein, 15 aa, synthetic construct
NDIVQGAEDQGIQGE

SEQ ID NO: 37467 - protein, 15 aa, synthetic construct
FTFVYTLMDHWVFGE

SEQ ID NO: 37468 - protein, 15 aa, synthetic construct
TIKNNNLSKDHYMLI

SEQ ID NO: 37469 - protein, 15 aa, synthetic construct
LSKDHYMLIVKVSDG

SEQ ID NO: 37470 - protein, 15 aa, synthetic construct
LIKNTQTYTFTISQS

SEQ ID NO: 37471 - protein, 15 aa, synthetic construct
DLTSSNLQVEEDPVD

SEQ ID NO: 37472 - protein, 15 aa, synthetic construct
LTIKNNNLSKDHYML

SEQ ID NO: 37473 - protein, 15 aa, synthetic construct
LAQLEHSEPIEAEPE

SEQ ID NO: 37474 - protein, 15 aa, synthetic construct
IKNTQTYTFTISQSV

SEQ ID NO: 37475 - protein, 15 aa, synthetic construct
AQLEHSEPIEAEPEA

SEQ ID NO: 37476 - protein, 15 aa, synthetic construct
KNNNLSKDHYMLIVK

SEQ ID NO: 37477 - protein, 15 aa, synthetic construct
HVPPNIAGTDEPRDI

SEQ ID NO: 37478 - protein, 15 aa, synthetic construct
LTSSNLQVEEDPVDF

SEQ ID NO: 37479 - protein, 15 aa, synthetic construct
KNTQTYTFTISQSVL

SEQ ID NO: 37480 - protein, 15 aa, synthetic construct
IVQGAEDQGIQGEEG

SEQ ID NO: 37481 - protein, 15 aa, synthetic construct
DIVQGAEDQGIQGEE

SEQ ID NO: 37482 - protein, 15 aa, synthetic construct
PPNIAGTDEPRDITV

SEQ ID NO: 37483 - protein, 15 aa, synthetic construct
SIRRASSVHDIEGFG

SEQ ID NO: 37484 - protein, 15 aa, synthetic construct
AMDNDIVQGAEDQGI

SEQ ID NO: 37485 - protein, 15 aa, synthetic construct
VLTIKNNNLSKDHYM

SEQ ID NO: 37486 - protein, 15 aa, synthetic construct
IKNNNLSKDHYMLIV

SEQ ID NO: 37487 - protein, 15 aa, synthetic construct
IRRASSVHDIEGFGV

SEQ ID NO: 37488 - protein, 15 aa, synthetic construct
GAEDQGIQGEEGAYE

SEQ ID NO: 37489 - protein, 15 aa, synthetic construct
NGNFNNSYSLHKGDY

SEQ ID NO: 37490 - protein, 15 aa, synthetic construct
VPPNIAGTDEPRDIT

SEQ ID NO: 37491 - protein, 15 aa, synthetic construct
GNFNNSYSLHKGDYN

SEQ ID NO: 37492 - protein, 15 aa, synthetic construct
FGAVTNVKVIRDFTT

SEQ ID NO: 37493 - protein, 15 aa, synthetic construct
AGGSGSSSSNSSGDA

SEQ ID NO: 37494 - protein, 15 aa, synthetic construct
QVECTGARIVAVPTP

SEQ ID NO: 37495 - protein, 15 aa, synthetic construct
EVSRNRGASLLARPG

SEQ ID NO: 37496 - protein, 15 aa, synthetic construct
AAGGSGSSSSNSSGD

SEQ ID NO: 37497 - protein, 15 aa, synthetic construct
CSIRRASSVHDIEGF

SEQ ID NO: 37498 - protein, 15 aa, synthetic construct
GARIVAVPTPLPWNA

SEQ ID NO: 37499 - protein, 9 aa, synthetic construct
GDKKGQSPL

SEQ ID NO: 37500 - protein, 11 aa, synthetic construct
QEGDKKGQSPL

SEQ ID NO: 37501 - protein, 15 aa, synthetic construct
RRGMEEVGIYRVSGV

SEQ ID NO: 37502 - protein, 15 aa, synthetic construct
ADRLRDPDSHIVKKI

SEQ ID NO: 37503 - protein, 9 aa, synthetic construct
NINEYKMRK

SEQ ID NO: 37504 - protein, 10 aa, synthetic construct
ILSPGYPDSY

SEQ ID NO: 37505 - protein, 10 aa, synthetic construct
GALRNMAVAK

SEQ ID NO: 37506 - protein, 11 aa, synthetic construct
HLVTESQSLNI

SEQ ID NO: 37507 - protein, 10 aa, synthetic construct
SLGRAQRQRK

SEQ ID NO: 37508 - protein, 9 aa, synthetic construct
VLSGGTTMY

SEQ ID NO: 37509 - protein, 11 aa, synthetic construct
GTTMYPGIADR

SEQ ID NO: 37510 - protein, 10 aa, synthetic construct
LSGYPPFVGH

SEQ ID NO: 37511 - protein, 10 aa, synthetic construct
KFTQFVHLKL

SEQ ID NO: 37512 - protein, 11 aa, synthetic construct
ASDDSGLEVRR

SEQ ID NO: 37513 - protein, 11 aa, synthetic construct
VAKHNLNIMIK

SEQ ID NO: 37514 - protein, 10 aa, synthetic construct
LSGRPHLPGK

SEQ ID NO: 37515 - protein, 9 aa, synthetic construct
PVIPTPHHY

SEQ ID NO: 37516 - protein, 11 aa, synthetic construct
QLSGRPHLPGK

SEQ ID NO: 37517 - protein, 9 aa, synthetic construct
GVCSEPVIK

SEQ ID NO: 37518 - protein, 11 aa, synthetic construct
VADTAQRSVSK

SEQ ID NO: 37519 - protein, 10 aa, synthetic construct
YAIKYVNLEE

SEQ ID NO: 37520 - protein, 9 aa, synthetic construct
VTESQSLNI

SEQ ID NO: 37521 - protein, 9 aa, synthetic construct
ALRNMAVAK

SEQ ID NO: 37522 - protein, 11 aa, synthetic construct
RAQRQRKGILK

SEQ ID NO: 37523 - protein, 11 aa, synthetic construct
QGALRNMAVAK

SEQ ID NO: 37524 - protein, 11 aa, synthetic construct
SLAPLLLHAPR

SEQ ID NO: 37525 - protein, 10 aa, synthetic construct
TNINEYKMRK

SEQ ID NO: 37526 - protein, 9 aa, synthetic construct
AIKYVNLEE

SEQ ID NO: 37527 - protein, 10 aa, synthetic construct
ALRNMAVAKH

SEQ ID NO: 37528 - protein, 10 aa, synthetic construct
TTMYPGIADR

SEQ ID NO: 37529 - protein, 11 aa, synthetic construct
AMYRATGQSHK

SEQ ID NO: 37530 - protein, 10 aa, synthetic construct
AMYRATGQSH

SEQ ID NO: 37531 - protein, 11 aa, synthetic construct
MLSGYPPFVGH

SEQ ID NO: 37532 - protein, 9 aa, synthetic construct
KMRKEVASK

SEQ ID NO: 37533 - protein, 9 aa, synthetic construct
TMYPGIADR

SEQ ID NO: 37534 - protein, 10 aa, synthetic construct
KMRKEVASKY

SEQ ID NO: 37535 - protein, 11 aa, synthetic construct
VVYKPQMEDQK

SEQ ID NO: 37536 - protein, 9 aa, synthetic construct
SNYRTLLEK

SEQ ID NO: 37537 - protein, 10 aa, synthetic construct
YKMRKEVASK

SEQ ID NO: 37538 - protein, 11 aa, synthetic construct
LVTESQSLNIK

SEQ ID NO: 37539 - protein, 10 aa, synthetic construct
LVTESQSLNI

SEQ ID NO: 37540 - protein, 9 aa, synthetic construct
SGRPHLPGK

SEQ ID NO: 37541 - protein, 10 aa, synthetic construct
AQRQRKGILK

SEQ ID NO: 37542 - protein, 11 aa, synthetic construct
LLHAPRVTPPR

SEQ ID NO: 37543 - protein, 10 aa, synthetic construct
VTESQSLNIK

SEQ ID NO: 37544 - protein, 10 aa, synthetic construct
TQFVHLKLHK

SEQ ID NO: 37545 - protein, 10 aa, synthetic construct
KPQMEDQKYK

SEQ ID NO: 37546 - protein, 10 aa, synthetic construct
VLKGSQLSAR

SEQ ID NO: 37547 - protein, 9 aa, synthetic construct
VLNEKKQIY

SEQ ID NO: 37548 - protein, 9 aa, synthetic construct
SGYPPFVGH

SEQ ID NO: 37549 - protein, 9 aa, synthetic construct
DTAQRSVSK

SEQ ID NO: 37550 - protein, 11 aa, synthetic construct
KVFQVLNEKKQ

SEQ ID NO: 37551 - protein, 9 aa, synthetic construct
PQMEDQKYK

SEQ ID NO: 37552 - protein, 10 aa, synthetic construct
ASDDSGLEVR

SEQ ID NO: 37553 - protein, 11 aa, synthetic construct
ATLPEFVVYKP

SEQ ID NO: 37554 - protein, 11 aa, synthetic construct
SLNIKRDATTK

SEQ ID NO: 37555 - protein, 9 aa, synthetic construct
ANPEGAHCK

SEQ ID NO: 37556 - protein, 10 aa, synthetic construct
ADTAQRSVSK

SEQ ID NO: 37557 - protein, 9 aa, synthetic construct
RAVQLLILL

SEQ ID NO: 37558 - protein, 11 aa, synthetic construct
NIISTVQPGAF

SEQ ID NO: 37559 - protein, 10 aa, synthetic construct
QVLNEKKQIY

SEQ ID NO: 37560 - protein, 9 aa, synthetic construct
EEKVIQVRY

SEQ ID NO: 37561 - protein, 9 aa, synthetic construct
STVQPGAFL

SEQ ID NO: 37562 - protein, 10 aa, synthetic construct
STPNGRDLRF

SEQ ID NO: 37563 - protein, 10 aa, synthetic construct
NVLSGGTTMY

SEQ ID NO: 37564 - protein, 9 aa, synthetic construct
TAQRSVSKY

SEQ ID NO: 37565 - protein, 9 aa, synthetic construct
TNSPLVPTF

SEQ ID NO: 37566 - protein, 11 aa, synthetic construct
MLTDPYGSQAR

SEQ ID NO: 37567 - protein, 9 aa, synthetic construct
WAFIPEASD

SEQ ID NO: 37568 - protein, 11 aa, synthetic construct
PVIPTPHHYLL

SEQ ID NO: 37569 - protein, 9 aa, synthetic construct
ETPDNQVGA

SEQ ID NO: 37570 - protein, 10 aa, synthetic construct
RAVQLLILLY

SEQ ID NO: 37571 - protein, 10 aa, synthetic construct
PVIPTPHHYL

SEQ ID NO: 37572 - protein, 9 aa, synthetic construct
LSPGYPDSY

SEQ ID NO: 37573 - protein, 9 aa, synthetic construct
MRKEVASKY

SEQ ID NO: 37574 - protein, 11 aa, synthetic construct
VPPVIPTPHHY

SEQ ID NO: 37575 - protein, 9 aa, synthetic construct
TPKENHSNY

SEQ ID NO: 37576 - protein, 9 aa, synthetic construct
APVLQYLYY

SEQ ID NO: 37577 - protein, 9 aa, synthetic construct
EIVELRQCW

SEQ ID NO: 37578 - protein, 10 aa, synthetic construct
PPVIPTPHHY

SEQ ID NO: 37579 - protein, 10 aa, synthetic construct
LTDPYGSQAR

SEQ ID NO: 37580 - protein, 10 aa, synthetic construct
DTAQRSVSKY

SEQ ID NO: 37581 - protein, 10 aa, synthetic construct
DVLVLKGSQL

SEQ ID NO: 37582 - protein, 10 aa, synthetic construct
HAAEEASSED

SEQ ID NO: 37583 - protein, 10 aa, synthetic construct
QEIVELRQCW

SEQ ID NO: 37584 - protein, 10 aa, synthetic construct
DIALELQAYF

SEQ ID NO: 37585 - protein, 9 aa, synthetic construct
SVADTAQRS

SEQ ID NO: 37586 - protein, 10 aa, synthetic construct
TMYPGIADRM

SEQ ID NO: 37587 - protein, 10 aa, synthetic construct
ETPKENHSNY

SEQ ID NO: 37588 - protein, 10 aa, synthetic construct
EADNQTLDSY

SEQ ID NO: 37589 - protein, 11 aa, synthetic construct
YRWAFIPEASD

SEQ ID NO: 37590 - protein, 9 aa, synthetic construct
TPNGRDLRF

SEQ ID NO: 37591 - protein, 9 aa, synthetic construct
AAEEASSED

SEQ ID NO: 37592 - protein, 9 aa, synthetic construct
DIALELQAY

SEQ ID NO: 37593 - protein, 10 aa, synthetic construct
EIKNEINGNW

SEQ ID NO: 37594 - protein, 11 aa, synthetic construct
RLGVRGGLVLY

SEQ ID NO: 37595 - protein, 10 aa, synthetic construct
LRFGFDPLAF

SEQ ID NO: 37596 - protein, 9 aa, synthetic construct
KPQMEDQKY

SEQ ID NO: 37597 - protein, 11 aa, synthetic construct
NNVLSGGTTMY

SEQ ID NO: 37598 - protein, 10 aa, synthetic construct
GDIALELQAY

SEQ ID NO: 37599 - protein, 11 aa, synthetic construct
AGDIALELQAY

SEQ ID NO: 37600 - protein, 9 aa, synthetic construct
VQPGAFLGL

SEQ ID NO: 37601 - protein, 9 aa, synthetic construct
VIMGSMAVM

SEQ ID NO: 37602 - protein, 10 aa, synthetic construct
WRHRPGAAGL

SEQ ID NO: 37603 - protein, 10 aa, synthetic construct
IISTVQPGAF

SEQ ID NO: 37604 - protein, 11 aa, synthetic construct
IMGSMAVMDAY

SEQ ID NO: 37605 - protein, 9 aa, synthetic construct
MEHDQRVTH

SEQ ID NO: 37606 - protein, 9 aa, synthetic construct
ADNQTLDSY

SEQ ID NO: 37607 - protein, 9 aa, synthetic construct
NQVGAEVQF

SEQ ID NO: 37608 - protein, 9 aa, synthetic construct
GSMAVMDAY

SEQ ID NO: 37609 - protein, 9 aa, synthetic construct
KAPVLQYLY

SEQ ID NO: 37610 - protein, 11 aa, synthetic construct
YKMRKEVASKY

SEQ ID NO: 37611 - protein, 10 aa, synthetic construct
RWAFIPEASD

SEQ ID NO: 37612 - protein, 9 aa, synthetic construct
TQFVHLKLH

SEQ ID NO: 37613 - protein, 9 aa, synthetic construct
RQTQPPAAL

SEQ ID NO: 37614 - protein, 9 aa, synthetic construct
KQLAGDIAL

SEQ ID NO: 37615 - protein, 9 aa, synthetic construct
VAKHNLNIM

SEQ ID NO: 37616 - protein, 10 aa, synthetic construct
VLSGGTTMYP

SEQ ID NO: 37617 - protein, 9 aa, synthetic construct
LRKAPVLQY

SEQ ID NO: 37618 - protein, 10 aa, synthetic construct
LLRKAPVLQY

SEQ ID NO: 37619 - protein, 9 aa, synthetic construct
VLYRAVQLL

SEQ ID NO: 37620 - protein, 11 aa, synthetic construct
VILSPGYPDSY

SEQ ID NO: 37621 - protein, 11 aa, synthetic construct
LLLRKAPVLQY

SEQ ID NO: 37622 - protein, 11 aa, synthetic construct
FQVLNEKKQIY

SEQ ID NO: 37623 - protein, 8 aa, synthetic construct
PQMEDQKY

SEQ ID NO: 37624 - protein, 9 aa, synthetic construct
VQLSGRPHL

SEQ ID NO: 37625 - protein, 10 aa, synthetic construct
AKQLAGDIAL

SEQ ID NO: 37626 - protein, 8 aa, synthetic construct
AQRSVSKY

SEQ ID NO: 37627 - protein, 11 aa, synthetic construct
APPGLPGQASL

SEQ ID NO: 37628 - protein, 11 aa, synthetic construct
NHAAEEASSED

SEQ ID NO: 37629 - protein, 9 aa, synthetic construct
VPPVIPTPH

SEQ ID NO: 37630 - protein, 11 aa, synthetic construct
AETPKENHSNY

SEQ ID NO: 37631 - protein, 8 aa, synthetic construct
SPGYPDSY

SEQ ID NO: 37632 - protein, 11 aa, synthetic construct
TPNGRDLRFGF

SEQ ID NO: 37633 - protein, 8 aa, synthetic construct
APVLQYLY

SEQ ID NO: 37634 - protein, 9 aa, synthetic construct
DPYGSQARL

SEQ ID NO: 37635 - protein, 8 aa, synthetic construct
DPYGSQAR

SEQ ID NO: 37636 - protein, 9 aa, synthetic construct
GCRLEEEEY

SEQ ID NO: 37637 - protein, 11 aa, synthetic construct
IPVSAASSSTL

SEQ ID NO: 37638 - protein, 8 aa, synthetic construct
EPMESYFF

SEQ ID NO: 37639 - protein, 11 aa, synthetic construct
GPFEEKVIQVR

SEQ ID NO: 37640 - protein, 9 aa, synthetic construct
TAAAATTAA

SEQ ID NO: 37641 - protein, 11 aa, synthetic construct
LPEFVVYKPQM

SEQ ID NO: 37642 - protein, 8 aa, synthetic construct
YPDSYPNL

SEQ ID NO: 37643 - protein, 8 aa, synthetic construct
MAVAKHNL

SEQ ID NO: 37644 - protein, 9 aa, synthetic construct
WVQAMYRAT

SEQ ID NO: 37645 - protein, 9 aa, synthetic construct
RSGSGHRQL

SEQ ID NO: 37646 - protein, 8 aa, synthetic construct
SAASSSTL

SEQ ID NO: 37647 - protein, 9 aa, synthetic construct
VSAASSSTL

SEQ ID NO: 37648 - protein, 11 aa, synthetic construct
MAVAKHNLNIM

SEQ ID NO: 37649 - protein, 9 aa, synthetic construct
LVIMGSMAV

SEQ ID NO: 37650 - protein, 9 aa, synthetic construct
LAGDIALEL

SEQ ID NO: 37651 - protein, 8 aa, synthetic construct
QTQPPAAL

SEQ ID NO: 37652 - protein, 10 aa, synthetic construct
YPDSYPNLQM

SEQ ID NO: 37653 - protein, 9 aa, synthetic construct
ASDDSGLEV

SEQ ID NO: 37654 - protein, 9 aa, synthetic construct
NMAVAKHNL

SEQ ID NO: 37655 - protein, 8 aa, synthetic construct
RAVQLLIL

SEQ ID NO: 37656 - protein, 8 aa, synthetic construct
LVLKGSQL

SEQ ID NO: 37657 - protein, 8 aa, synthetic construct
KAPVLQYL

SEQ ID NO: 37658 - protein, 10 aa, synthetic construct
FVQLSGRPHL

SEQ ID NO: 37659 - protein, 9 aa, synthetic construct
MLSGYPPFV

SEQ ID NO: 37660 - protein, 8 aa, synthetic construct
VLYRAVQL

SEQ ID NO: 37661 - protein, 9 aa, synthetic construct
VADTAQRSV

SEQ ID NO: 37662 - protein, 9 aa, synthetic construct
STPNGRDLR

SEQ ID NO: 37663 - protein, 9 aa, synthetic construct
FQDYFGVCS

SEQ ID NO: 37664 - protein, 9 aa, synthetic construct
GVLYRAVQL

SEQ ID NO: 37665 - protein, 8 aa, synthetic construct
FVVYKPQM

SEQ ID NO: 37666 - protein, 9 aa, synthetic construct
VLVLKGSQL

SEQ ID NO: 37667 - protein, 9 aa, synthetic construct
ISTVQPGAF

SEQ ID NO: 37668 - protein, 9 aa, synthetic construct
VVLGNKIDL

SEQ ID NO: 37669 - protein, 11 aa, synthetic construct
GFDPQGALRNM

SEQ ID NO: 37670 - protein, 10 aa, synthetic construct
HYEPMESYFF

SEQ ID NO: 37671 - protein, 9 aa, synthetic construct
MYPGIADRM

SEQ ID NO: 37672 - protein, 9 aa, synthetic construct
NHSNYRTLL

SEQ ID NO: 37673 - protein, 9 aa, synthetic construct
SSDDSGKQI

SEQ ID NO: 37674 - protein, 8 aa, synthetic construct
SDDSGLEV

SEQ ID NO: 37675 - protein, 9 aa, synthetic construct
FEEKVIQVR

SEQ ID NO: 37676 - protein, 8 aa, synthetic construct
RYDPCRSA

SEQ ID NO: 37677 - protein, 9 aa, synthetic construct
RFGFDPLAF

SEQ ID NO: 37678 - protein, 8 aa, synthetic construct
FRDERELL

SEQ ID NO: 37679 - protein, 9 aa, synthetic construct
KIDLENRQV

SEQ ID NO: 37680 - protein, 10 aa, synthetic construct
RYDPCRSADI

SEQ ID NO: 37681 - protein, 9 aa, synthetic construct
YRAVQLLIL

SEQ ID NO: 37682 - protein, 9 aa, synthetic construct
TGDAGPPPV

SEQ ID NO: 37683 - protein, 9 aa, synthetic construct
GYPDSYPNL

SEQ ID NO: 37684 - protein, 8 aa, synthetic construct
VADTAQRS

SEQ ID NO: 37685 - protein, 9 aa, synthetic construct
RRPECGRGL

SEQ ID NO: 37686 - protein, 10 aa, synthetic construct
TFQDYFGVCS

SEQ ID NO: 37687 - protein, 9 aa, synthetic construct
NPEGAHCKV

SEQ ID NO: 37688 - protein, 15 aa, synthetic construct
GQLNRFVQLSGRPHL

SEQ ID NO: 37689 - protein, 15 aa, synthetic construct
TGQLNRFVQLSGRPH

SEQ ID NO: 37690 - protein, 15 aa, synthetic construct
KQIYAIKYVNLEEAD

SEQ ID NO: 37691 - protein, 15 aa, synthetic construct
DVLVLKGSQLSARAA

SEQ ID NO: 37692 - protein, 15 aa, synthetic construct
SQARLGVRGGLVLYN

SEQ ID NO: 37693 - protein, 15 aa, synthetic construct
IECHYEPMESYFFKE

SEQ ID NO: 37694 - protein, 15 aa, synthetic construct
FPFVVLGNKIDLENR

SEQ ID NO: 37695 - protein, 15 aa, synthetic construct
GGFDPQGALRNMAVA

SEQ ID NO: 37696 - protein, 15 aa, synthetic construct
NRFVQLSGRPHLPGK

SEQ ID NO: 37697 - protein, 15 aa, synthetic construct
HEIYIQAKDKGANPE

SEQ ID NO: 37698 - protein, 15 aa, synthetic construct
HYEPMESYFFKETSH

SEQ ID NO: 37699 - protein, 15 aa, synthetic construct
VLYIMLSGYPPFVGH

SEQ ID NO: 37700 - protein, 15 aa, synthetic construct
SGKQISCVAENLVGE

SEQ ID NO: 37701 - protein, 15 aa, synthetic construct
VYDVLVLKGSQLSAR

SEQ ID NO: 37702 - protein, 15 aa, synthetic construct
FGGFDPQGALRNMAV

SEQ ID NO: 37703 - protein, 15 aa, synthetic construct
AIKYVNLEEADNQTL

SEQ ID NO: 37704 - protein, 15 aa, synthetic construct
TLPEFVVYKPQMEDQ

SEQ ID NO: 37705 - protein, 15 aa, synthetic construct
TAILATLPEFVVYKP

SEQ ID NO: 37706 - protein, 15 aa, synthetic construct
SYFFKETSHESVDSS

SEQ ID NO: 37707 - protein, 15 aa, synthetic construct
INEYKMRKEVASKYT

SEQ ID NO: 37708 - protein, 15 aa, synthetic construct
GPWWREGTLAVRGDP

SEQ ID NO: 37709 - protein, 15 aa, synthetic construct
QAMYRATGQSHKPVP

SEQ ID NO: 37710 - protein, 15 aa, synthetic construct
PEFVVYKPQMEDQKY

SEQ ID NO: 37711 - protein, 15 aa, synthetic construct
QLNRFVQLSGRPHLP

SEQ ID NO: 37712 - protein, 15 aa, synthetic construct
RFVQLSGRPHLPGKK

SEQ ID NO: 37713 - protein, 15 aa, synthetic construct
QVALAKQLAGDIALE

SEQ ID NO: 37714 - protein, 15 aa, synthetic construct
SKVFQVLNEKKQIYA

SEQ ID NO: 37715 - protein, 15 aa, synthetic construct
YAIKYVNLEEADNQT

SEQ ID NO: 37716 - protein, 15 aa, synthetic construct
YGSQARLGVRGGLVL

SEQ ID NO: 37717 - protein, 15 aa, synthetic construct
QARLGVRGGLVLYNL

SEQ ID NO: 37718 - protein, 15 aa, synthetic construct
ESYFFKETSHESVDS

SEQ ID NO: 37719 - protein, 15 aa, synthetic construct
NFPFVVLGNKIDLEN

SEQ ID NO: 37720 - protein, 15 aa, synthetic construct
GVVLYIMLSGYPPFV

SEQ ID NO: 37721 - protein, 15 aa, synthetic construct
KLHEIYIQAKDKGAN

SEQ ID NO: 37722 - protein, 15 aa, synthetic construct
EIYIQAKDKGANPEG

SEQ ID NO: 37723 - protein, 15 aa, synthetic construct
ENFPFVVLGNKIDLE

SEQ ID NO: 37724 - protein, 15 aa, synthetic construct
TLVIMGSMAVMDAYL

SEQ ID NO: 37725 - protein, 15 aa, synthetic construct
YDVLVLKGSQLSARA

SEQ ID NO: 37726 - protein, 15 aa, synthetic construct
LTTLVIMGSMAVMDA

SEQ ID NO: 37727 - protein, 15 aa, synthetic construct
RVYDVLVLKGSQLSA

SEQ ID NO: 37728 - protein, 15 aa, synthetic construct
KFGGFDPQGALRNMA

SEQ ID NO: 37729 - protein, 15 aa, synthetic construct
RWAFIPEASDDSGLE

SEQ ID NO: 37730 - protein, 15 aa, synthetic construct
PENFPFVVLGNKIDL

SEQ ID NO: 37731 - protein, 15 aa, synthetic construct
IYAIKYVNLEEADNQ

SEQ ID NO: 37732 - protein, 15 aa, synthetic construct
CHYEPMESYFFKETS

SEQ ID NO: 37733 - protein, 15 aa, synthetic construct
ERGPWWREGTLAVRG

SEQ ID NO: 37734 - protein, 15 aa, synthetic construct
GERGPWWREGTLAVR

SEQ ID NO: 37735 - protein, 15 aa, synthetic construct
VQAMYRATGQSHKPV

SEQ ID NO: 37736 - protein, 15 aa, synthetic construct
EKKQIYAIKYVNLEE

SEQ ID NO: 37737 - protein, 15 aa, synthetic construct
GSQARLGVRGGLVLY

SEQ ID NO: 37738 - protein, 15 aa, synthetic construct
ECHYEPMESYFFKET

SEQ ID NO: 37739 - protein, 15 aa, synthetic construct
RGPWWREGTLAVRGD

SEQ ID NO: 37740 - protein, 15 aa, synthetic construct
RIECHYEPMESYFFK

SEQ ID NO: 37741 - protein, 15 aa, synthetic construct
LNRFVQLSGRPHLPG

SEQ ID NO: 37742 - protein, 15 aa, synthetic construct
VVLYIMLSGYPPFVG

SEQ ID NO: 37743 - protein, 15 aa, synthetic construct
ASSEDEEEEEVQAMQ

SEQ ID NO: 37744 - protein, 15 aa, synthetic construct
LHEIYIQAKDKGANP

SEQ ID NO: 37745 - protein, 15 aa, synthetic construct
YRWAFIPEASDDSGL

SEQ ID NO: 37746 - protein, 15 aa, synthetic construct
CLTTLVIMGSMAVMD

SEQ ID NO: 37747 - protein, 15 aa, synthetic construct
SSEDEEEEEVQAMQS

SEQ ID NO: 37748 - protein, 15 aa, synthetic construct
RSAYMLTDPYGSQAR

SEQ ID NO: 37749 - protein, 15 aa, synthetic construct
PGGFGQTAGWRHRPG

SEQ ID NO: 37750 - protein, 15 aa, synthetic construct
VCLTTLVIMGSMAVM

SEQ ID NO: 37751 - protein, 15 aa, synthetic construct
MYRWAFIPEASDDSG

SEQ ID NO: 37752 - protein, 15 aa, synthetic construct
WAFIPEASDDSGLEV

SEQ ID NO: 37753 - protein, 15 aa, synthetic construct
SKFGGFDPQGALRNM

SEQ ID NO: 37754 - protein, 15 aa, synthetic construct
KKQIYAIKYVNLEEA

SEQ ID NO: 37755 - protein, 15 aa, synthetic construct
PMESYFFKETSHESV

SEQ ID NO: 37756 - protein, 15 aa, synthetic construct
TTLVIMGSMAVMDAY

SEQ ID NO: 37757 - protein, 15 aa, synthetic construct
MESYFFKETSHESVD

SEQ ID NO: 37758 - protein, 15 aa, synthetic construct
WRVYDVLVLKGSQLS

SEQ ID NO: 37759 - protein, 15 aa, synthetic construct
LPEFVVYKPQMEDQK

SEQ ID NO: 37760 - protein, 15 aa, synthetic construct
VAKHNLNIMIKRYNS

SEQ ID NO: 37761 - protein, 15 aa, synthetic construct
STGVILSPGYPDSYP

SEQ ID NO: 37762 - protein, 15 aa, synthetic construct
TRNMAAGCRLEEEEY

SEQ ID NO: 37763 - protein, 15 aa, synthetic construct
SPIIQQLEKSDAEYT

SEQ ID NO: 37764 - protein, 15 aa, synthetic construct
VLGNKIDLENRQVAT

SEQ ID NO: 37765 - protein, 15 aa, synthetic construct
EQFAETPKENHSNYR

SEQ ID NO: 37766 - protein, 15 aa, synthetic construct
KFTQFVHLKLHKRLH

SEQ ID NO: 37767 - protein, 15 aa, synthetic construct
IKYVNLEEADNQTLD

SEQ ID NO: 37768 - protein, 15 aa, synthetic construct
LGNKIDLENRQVATK

SEQ ID NO: 37769 - protein, 15 aa, synthetic construct
EINGNWISASSINEA

SEQ ID NO: 37770 - protein, 15 aa, synthetic construct
PAKFTQFVHLKLHKR

SEQ ID NO: 37771 - protein, 15 aa, synthetic construct
AKHNLNIMIKRYNST

SEQ ID NO: 37772 - protein, 15 aa, synthetic construct
PECGRGLHTRAYEDT

SEQ ID NO: 37773 - protein, 15 aa, synthetic construct
LTRNMAAGCRLEEEE

SEQ ID NO: 37774 - protein, 15 aa, synthetic construct
AKFTQFVHLKLHKRL

SEQ ID NO: 37775 - protein, 15 aa, synthetic construct
KVFQVLNEKKQIYAI

SEQ ID NO: 37776 - protein, 15 aa, synthetic construct
CPAKFTQFVHLKLHK

SEQ ID NO: 37777 - protein, 15 aa, synthetic construct
GSEQFAETPKENHSN

SEQ ID NO: 37778 - protein, 15 aa, synthetic construct
QIYAIKYVNLEEADN

SEQ ID NO: 37779 - protein, 15 aa, synthetic construct
GALRNMAVAKHNLNI

SEQ ID NO: 37780 - protein, 15 aa, synthetic construct
SEQFAETPKENHSNY

SEQ ID NO: 37781 - protein, 15 aa, synthetic construct
ECGRGLHTRAYEDTA

SEQ ID NO: 37782 - protein, 15 aa, synthetic construct
SVSKYRCVIRSDGGS

SEQ ID NO: 37783 - protein, 15 aa, synthetic construct
ALRNMAVAKHNLNIM

SEQ ID NO: 37784 - protein, 15 aa, synthetic construct
RNMAAGCRLEEEEYE

SEQ ID NO: 37785 - protein, 15 aa, synthetic construct
TFCLETLPEFRDERE

SEQ ID NO: 37786 - protein, 15 aa, synthetic construct
VFQVLNEKKQIYAIK

SEQ ID NO: 37787 - protein, 15 aa, synthetic construct
TQFVHLKLHKRLHTR

SEQ ID NO: 37788 - protein, 15 aa, synthetic construct
EFVVYKPQMEDQKYK

SEQ ID NO: 37789 - protein, 15 aa, synthetic construct
QGSLRITNISSDDSG

SEQ ID NO: 37790 - protein, 15 aa, synthetic construct
LRNMAVAKHNLNIMI

SEQ ID NO: 37791 - protein, 15 aa, synthetic construct
DPENFPFVVLGNKID

SEQ ID NO: 37792 - protein, 15 aa, synthetic construct
QLSILINNIPDESQV

SEQ ID NO: 37793 - protein, 15 aa, synthetic construct
VQLSILINNIPDESQ

SEQ ID NO: 37794 - protein, 15 aa, synthetic construct
RSVSKYRCVIRSDGG

SEQ ID NO: 37795 - protein, 15 aa, synthetic construct
GNKIDLENRQVATKR

SEQ ID NO: 37796 - protein, 15 aa, synthetic construct
FTQFVHLKLHKRLHT

SEQ ID NO: 37797 - protein, 15 aa, synthetic construct
EPMESYFFKETSHES

SEQ ID NO: 37798 - protein, 15 aa, synthetic construct
LLTRNMAAGCRLEEE

SEQ ID NO: 37799 - protein, 15 aa, synthetic construct
KVIVVRNRRLGVLYR

SEQ ID NO: 37800 - protein, 15 aa, synthetic construct
ATLPEFVVYKPQMED

SEQ ID NO: 37801 - protein, 15 aa, synthetic construct
LGSEQFAETPKENHS

SEQ ID NO: 37802 - protein, 15 aa, synthetic construct
NKIDLENRQVATKRA

SEQ ID NO: 37803 - protein, 15 aa, synthetic construct
PFVVLGNKIDLENRQ

SEQ ID NO: 37804 - protein, 15 aa, synthetic construct
NEKKQIYAIKYVNLE

SEQ ID NO: 37805 - protein, 15 aa, synthetic construct
NINEYKMRKEVASKY

SEQ ID NO: 37806 - protein, 15 aa, synthetic construct
RPECGRGLHTRAYED

SEQ ID NO: 37807 - protein, 15 aa, synthetic construct
RGLHTRAYEDTADDG

SEQ ID NO: 37808 - protein, 15 aa, synthetic construct
ETPDNQVGAEVQFRH

SEQ ID NO: 37809 - protein, 15 aa, synthetic construct
FSATVSVADTAQRSV

SEQ ID NO: 37810 - protein, 15 aa, synthetic construct
PPETAAAATTAAAAS

SEQ ID NO: 37811 - protein, 15 aa, synthetic construct
TPDNQVGAEVQFRHR

SEQ ID NO: 37812 - protein, 15 aa, synthetic construct
RSNHAAEEASSEDEE

SEQ ID NO: 37813 - protein, 15 aa, synthetic construct
WREGTLAVRGDPGGE

SEQ ID NO: 37814 - protein, 15 aa, synthetic construct
SRSRSRSRSASSNSR

SEQ ID NO: 37815 - protein, 15 aa, synthetic construct
SRSRSRSRSRSASSN

SEQ ID NO: 37816 - protein, 15 aa, synthetic construct
IQAKDKGANPEGAHC

SEQ ID NO: 37817 - protein, 15 aa, synthetic construct
ETAAAATTAAAASSS

SEQ ID NO: 37818 - protein, 15 aa, synthetic construct
KNEINGNWISASSIN

SEQ ID NO: 37819 - protein, 15 aa, synthetic construct
PPRSNHAAEEASSED

SEQ ID NO: 37820 - protein, 15 aa, synthetic construct
ARLGVRGGLVLYNLP

SEQ ID NO: 37821 - protein, 15 aa, synthetic construct
SNHAAEEASSEDEEE

SEQ ID NO: 37822 - protein, 15 aa, synthetic construct
IYIQAKDKGANPEGA

SEQ ID NO: 37823 - protein, 15 aa, synthetic construct
LPPPETAAAATTAAA

SEQ ID NO: 37824 - protein, 15 aa, synthetic construct
SRSRSRSASSNSRKS

SEQ ID NO: 37825 - protein, 15 aa, synthetic construct
PRSNHAAEEASSEDE

SEQ ID NO: 37826 - protein, 15 aa, synthetic construct
QAKDKGANPEGAHCK

SEQ ID NO: 37827 - protein, 15 aa, synthetic construct
SGDEENAGTEEIKNE

SEQ ID NO: 37828 - protein, 15 aa, synthetic construct
QERATEAENVPPVIP

SEQ ID NO: 37829 - protein, 15 aa, synthetic construct
AAAATTAAAASSSAA

SEQ ID NO: 37830 - protein, 15 aa, synthetic construct
EHDQRVTHSDISDPK

SEQ ID NO: 37831 - protein, 15 aa, synthetic construct
MLTDPYGSQARLGVR

SEQ ID NO: 37832 - protein, 15 aa, synthetic construct
NVLSGGTTMYPGIAD

SEQ ID NO: 37833 - protein, 15 aa, synthetic construct
RFSATVSVADTAQRS

SEQ ID NO: 37834 - protein, 15 aa, synthetic construct
TESSETTTATTIGSE

SEQ ID NO: 37835 - protein, 15 aa, synthetic construct
KGIIHLVTESQSLNI

SEQ ID NO: 37836 - protein, 15 aa, synthetic construct
EAQERATEAENVPPV

SEQ ID NO: 37837 - protein, 15 aa, synthetic construct
TAAAASSSAASPHYQ

SEQ ID NO: 37838 - protein, 15 aa, synthetic construct
ALPPPETAAAATTAA

SEQ ID NO: 37839 - protein, 15 aa, synthetic construct
TDPYGSQARLGVRGG

SEQ ID NO: 37840 - protein, 15 aa, synthetic construct
FDPQGALRNMAVAKH

SEQ ID NO: 37841 - protein, 15 aa, synthetic construct
AATTAAAASSSAASP

SEQ ID NO: 37842 - protein, 15 aa, synthetic construct
TATTIGSETTTASTE

SEQ ID NO: 37843 - protein, 15 aa, synthetic construct
IQQLEKSDAEYTNSP

SEQ ID NO: 37844 - protein, 15 aa, synthetic construct
QMYRWAFIPEASDDS

SEQ ID NO: 37845 - protein, 15 aa, synthetic construct
GFDPQGALRNMAVAK

SEQ ID NO: 37846 - protein, 15 aa, synthetic construct
GRGLHTRAYEDTADD

SEQ ID NO: 37847 - protein, 15 aa, synthetic construct
ATTAAAASSSAASPH

SEQ ID NO: 37848 - protein, 15 aa, synthetic construct
WWREGTLAVRGDPGG

SEQ ID NO: 37849 - protein, 15 aa, synthetic construct
GRDLRFGFDPLAFPE

SEQ ID NO: 37850 - protein, 15 aa, synthetic construct
QGALRNMAVAKHNLN

SEQ ID NO: 37851 - protein, 15 aa, synthetic construct
YIQAKDKGANPEGAH

SEQ ID NO: 37852 - protein, 15 aa, synthetic construct
PQGALRNMAVAKHNL

SEQ ID NO: 37853 - protein, 15 aa, synthetic construct
RSRSRSRSASSNSRK

SEQ ID NO: 37854 - protein, 15 aa, synthetic construct
DQRVTHSDISDPKNS

SEQ ID NO: 37855 - protein, 15 aa, synthetic construct
TAAAATTAAAASSSA

SEQ ID NO: 37856 - protein, 15 aa, synthetic construct
EGTLAVRGDPGGERG

SEQ ID NO: 37857 - protein, 15 aa, synthetic construct
FQMYRWAFIPEASDD

SEQ ID NO: 37858 - protein, 15 aa, synthetic construct
DPQGALRNMAVAKHN

SEQ ID NO: 37859 - protein, 15 aa, synthetic construct
MEHDQRVTHSDISDP

SEQ ID NO: 37860 - protein, 15 aa, synthetic construct
SSETTTATTIGSETT

SEQ ID NO: 37861 - protein, 15 aa, synthetic construct
PPPETAAAATTAAAA

SEQ ID NO: 37862 - protein, 15 aa, synthetic construct
YEIEDGSTPNGRDLR

SEQ ID NO: 37863 - protein, 15 aa, synthetic construct
AKDKGANPEGAHCKV

SEQ ID NO: 37864 - protein, 15 aa, synthetic construct
HDQRVTHSDISDPKN

SEQ ID NO: 37865 - protein, 15 aa, synthetic construct
AAATTAAAASSSAAS

SEQ ID NO: 37866 - protein, 15 aa, synthetic construct
PETAAAATTAAAASS

SEQ ID NO: 37867 - protein, 15 aa, synthetic construct
PDNQVGAEVQFRHRT

SEQ ID NO: 37868 - protein, 15 aa, synthetic construct
TTAAAASSSAASPHY

SEQ ID NO: 37869 - protein, 15 aa, synthetic construct
AQERATEAENVPPVI

SEQ ID NO: 37870 - protein, 15 aa, synthetic construct
GDEENAGTEEIKNEI

SEQ ID NO: 37871 - protein, 15 aa, synthetic construct
LTDPYGSQARLGVRG

SEQ ID NO: 37872 - protein, 15 aa, synthetic construct
PALPPPETAAAATTA

SEQ ID NO: 37873 - protein, 15 aa, synthetic construct
LKGSQLSARAADGSP

SEQ ID NO: 37874 - protein, 15 aa, synthetic construct
QFQMYRWAFIPEASD

SEQ ID NO: 37875 - protein, 15 aa, synthetic construct
ESSETTTATTIGSET

SEQ ID NO: 37876 - protein, 15 aa, synthetic construct
FEAQERATEAENVPP

SEQ ID NO: 37877 - protein, 15 aa, synthetic construct
SATVSVADTAQRSVS

SEQ ID NO: 37878 - protein, 15 aa, synthetic construct
PWWREGTLAVRGDPG

SEQ ID NO: 37879 - protein, 15 aa, synthetic construct
DNQTLDSYRNEIAYL

SEQ ID NO: 37880 - protein, 15 aa, synthetic construct
HRVVDTFQDYFGVCS

SEQ ID NO: 37881 - protein, 15 aa, synthetic construct
LQDVNTNINEYKMRK

SEQ ID NO: 37882 - protein, 15 aa, synthetic construct
PGYPDSYPNLQMCAW

SEQ ID NO: 37883 - protein, 15 aa, synthetic construct
SMAVMDAYLVEQNQG

SEQ ID NO: 37884 - protein, 15 aa, synthetic construct
LSPGYPDSYPNLQMC

SEQ ID NO: 37885 - protein, 15 aa, synthetic construct
RDLRFGFDPLAFPEF

SEQ ID NO: 37886 - protein, 15 aa, synthetic construct
ADNQTLDSYRNEIAY

SEQ ID NO: 37887 - protein, 15 aa, synthetic construct
TNINEYKMRKEVASK

SEQ ID NO: 37888 - protein, 15 aa, synthetic construct
IMGSMAVMDAYLVEQ

SEQ ID NO: 37889 - protein, 15 aa, synthetic construct
VIMGSMAVMDAYLVE

SEQ ID NO: 37890 - protein, 15 aa, synthetic construct
QDVNTNINEYKMRKE

SEQ ID NO: 37891 - protein, 15 aa, synthetic construct
SILINNIPDESQVEK

SEQ ID NO: 37892 - protein, 15 aa, synthetic construct
ILSPGYPDSYPNLQM

SEQ ID NO: 37893 - protein, 15 aa, synthetic construct
LEKSDAEYTNSPLVP

SEQ ID NO: 37894 - protein, 15 aa, synthetic construct
PKENHSNYRTLLEKE

SEQ ID NO: 37895 - protein, 15 aa, synthetic construct
MAVMDAYLVEQNQGP

SEQ ID NO: 37896 - protein, 15 aa, synthetic construct
DVNTNINEYKMRKEV

SEQ ID NO: 37897 - protein, 15 aa, synthetic construct
SPGYPDSYPNLQMCA

SEQ ID NO: 37898 - protein, 15 aa, synthetic construct
FQDYFGVCSEPVIKD

SEQ ID NO: 37899 - protein, 15 aa, synthetic construct
YEPMESYFFKETSHE

SEQ ID NO: 37900 - protein, 15 aa, synthetic construct
KENHSNYRTLLEKEK

SEQ ID NO: 37901 - protein, 15 aa, synthetic construct
GSMAVMDAYLVEQNQ

SEQ ID NO: 37902 - protein, 15 aa, synthetic construct
TLHDWYGQEIVELRQ

SEQ ID NO: 37903 - protein, 15 aa, synthetic construct
VNTNINEYKMRKEVA

SEQ ID NO: 37904 - protein, 15 aa, synthetic construct
YQNWRVYDVLVLKGS

SEQ ID NO: 37905 - protein, 15 aa, synthetic construct
AKQLAGDIALELQAY

SEQ ID NO: 37906 - protein, 15 aa, synthetic construct
EKSDAEYTNSPLVPT

SEQ ID NO: 37907 - protein, 15 aa, synthetic construct
NTNINEYKMRKEVAS

SEQ ID NO: 37908 - protein, 15 aa, synthetic construct
HNYQNWRVYDVLVLK

SEQ ID NO: 37909 - protein, 15 aa, synthetic construct
STLHDWYGQEIVELR

SEQ ID NO: 37910 - protein, 15 aa, synthetic construct
QDYFGVCSEPVIKDN

SEQ ID NO: 37911 - protein, 15 aa, synthetic construct
GCRLEEEEYEDDAYG

SEQ ID NO: 37912 - protein, 15 aa, synthetic construct
RVVDTFQDYFGVCSE

SEQ ID NO: 37913 - protein, 15 aa, synthetic construct
MGSMAVMDAYLVEQN

SEQ ID NO: 37914 - protein, 15 aa, synthetic construct
EADNQTLDSYRNEIA

SEQ ID NO: 37915 - protein, 15 aa, synthetic construct
CGRGLHTRAYEDTAD

SEQ ID NO: 37916 - protein, 15 aa, synthetic construct
NGRDLRFGFDPLAFP

SEQ ID NO: 37917 - protein, 15 aa, synthetic construct
NYQNWRVYDVLVLKG

SEQ ID NO: 37918 - protein, 15 aa, synthetic construct
KGANPEGAHCKVLVE

SEQ ID NO: 37919 - protein, 15 aa, synthetic construct
RLGVRGGLVLYNLPF

SEQ ID NO: 37920 - protein, 15 aa, synthetic construct
GTTMYPGIADRMQKE

SEQ ID NO: 37921 - protein, 15 aa, synthetic construct
AYMLTDPYGSQARLG

SEQ ID NO: 37922 - protein, 15 aa, synthetic construct
RYDPCRSADIALVAG

SEQ ID NO: 37923 - protein, 15 aa, synthetic construct
SGGTTMYPGIADRMQ

SEQ ID NO: 37924 - protein, 15 aa, synthetic construct
YMLTDPYGSQARLGV

SEQ ID NO: 37925 - protein, 15 aa, synthetic construct
VPPTGDAGPPPVPPT

SEQ ID NO: 37926 - protein, 15 aa, synthetic construct
GGTTMYPGIADRMQK

SEQ ID NO: 37927 - protein, 15 aa, synthetic construct
GANPEGAHCKVLVEV

SEQ ID NO: 37928 - protein, 15 aa, synthetic construct
PGLPGQASLLQAAPG

SEQ ID NO: 37929 - protein, 15 aa, synthetic construct
DPYGSQARLGVRGGL

SEQ ID NO: 37930 - protein, 15 aa, synthetic construct
PVPPTGDAGPPPVPP

SEQ ID NO: 37931 - protein, 15 aa, synthetic construct
VCPAKFTQFVHLKLH

SEQ ID NO: 37932 - protein, 15 aa, synthetic construct
TLAVRGDPGGERGPW

SEQ ID NO: 37933 - protein, 15 aa, synthetic construct
IKNEINGNWISASSI

SEQ ID NO: 37934 - protein, 15 aa, synthetic construct
GTLAVRGDPGGERGP

SEQ ID NO: 37935 - protein, 15 aa, synthetic construct
DRILWVQAMYRATGQ

SEQ ID NO: 37936 - protein, 15 aa, synthetic construct
NEYKMRKEVASKYTK

SEQ ID NO: 37937 - protein, 15 aa, synthetic construct
LPEFRDERELLRHPP

SEQ ID NO: 37938 - protein, 15 aa, synthetic construct
QDRILWVQAMYRATG

SEQ ID NO: 37939 - protein, 15 aa, synthetic construct
EIKNEINGNWISASS

SEQ ID NO: 37940 - protein, 15 aa, synthetic construct
EQDRILWVQAMYRAT

SEQ ID NO: 37941 - protein, 15 aa, synthetic construct
SLRITNISSDDSGKQ

SEQ ID NO: 37942 - protein, 15 aa, synthetic construct
QNWRVYDVLVLKGSQ

SEQ ID NO: 37943 - protein, 15 aa, synthetic construct
AQRSVSKYRCVIRSD

SEQ ID NO: 37944 - protein, 15 aa, synthetic construct
REGTLAVRGDPGGER

SEQ ID NO: 37945 - protein, 15 aa, synthetic construct
QRSVSKYRCVIRSDG

SEQ ID NO: 37946 - protein, 10 aa, synthetic construct
GSPLPGKVKY

SEQ ID NO: 37947 - protein, 11 aa, synthetic construct
QEEYSAMRDQY

SEQ ID NO: 37948 - protein, 10 aa, synthetic construct
SGGPLMHSPY

SEQ ID NO: 37949 - protein, 10 aa, synthetic construct
AVGGYDGQAY

SEQ ID NO: 37950 - protein, 10 aa, synthetic construct
VSSSEQLQSY

SEQ ID NO: 37951 - protein, 9 aa, synthetic construct
FRDRTDIQC

SEQ ID NO: 37952 - protein, 11 aa, synthetic construct
IADNGGLKAAY

SEQ ID NO: 37953 - protein, 10 aa, synthetic construct
ELPLHLNKRY

SEQ ID NO: 37954 - protein, 9 aa, synthetic construct
VGGYDGQAY

SEQ ID NO: 37955 - protein, 9 aa, synthetic construct
LGSAVGGGY

SEQ ID NO: 37956 - protein, 9 aa, synthetic construct
SSSEQLQSY

SEQ ID NO: 37957 - protein, 10 aa, synthetic construct
LVNMGGEQVY

SEQ ID NO: 37958 - protein, 9 aa, synthetic construct
VVKTSVQWC

SEQ ID NO: 37959 - protein, 10 aa, synthetic construct
YTIMAYTPTY

SEQ ID NO: 37960 - protein, 9 aa, synthetic construct
CLSYLLSGY

SEQ ID NO: 37961 - protein, 9 aa, synthetic construct
YVTLAGSEF

SEQ ID NO: 37962 - protein, 9 aa, synthetic construct
KLDQEDALL

SEQ ID NO: 37963 - protein, 11 aa, synthetic construct
DILDTAGQEEY

SEQ ID NO: 37964 - protein, 11 aa, synthetic construct
TEEKPYKCEEY

SEQ ID NO: 37965 - protein, 11 aa, synthetic construct
LDQEDALLGSY

SEQ ID NO: 37966 - protein, 9 aa, synthetic construct
MQEGVRSGF

SEQ ID NO: 37967 - protein, 11 aa, synthetic construct
SSAYGLVHCCY

SEQ ID NO: 37968 - protein, 10 aa, synthetic construct
FYVTLAGSEF

SEQ ID NO: 37969 - protein, 10 aa, synthetic construct
VTNIPQGMVT

SEQ ID NO: 37970 - protein, 9 aa, synthetic construct
QVDIKGPKL

SEQ ID NO: 37971 - protein, 9 aa, synthetic construct
ELTDSCQPY

SEQ ID NO: 37972 - protein, 10 aa, synthetic construct
GSQLAPERHY

SEQ ID NO: 37973 - protein, 11 aa, synthetic construct
TSGGPLMHSPY

SEQ ID NO: 37974 - protein, 11 aa, synthetic construct
TTLADYLHLLQ

SEQ ID NO: 37975 - protein, 11 aa, synthetic construct
LSYLLSGYTPY

SEQ ID NO: 37976 - protein, 11 aa, synthetic construct
VVSSSEQLQSY

SEQ ID NO: 37977 - protein, 10 aa, synthetic construct
MDTAEEGRIY

SEQ ID NO: 37978 - protein, 9 aa, synthetic construct
ITDVDFIYQ

SEQ ID NO: 37979 - protein, 8 aa, synthetic construct
ITDVDFIY

SEQ ID NO: 37980 - protein, 9 aa, synthetic construct
SSEQLQSYQ

SEQ ID NO: 37981 - protein, 8 aa, synthetic construct
SSEQLQSY

SEQ ID NO: 37982 - protein, 10 aa, synthetic construct
SCQPYRSAFY

SEQ ID NO: 37983 - protein, 9 aa, synthetic construct
YTEEKPYKC

SEQ ID NO: 37984 - protein, 10 aa, synthetic construct
IFRDRTDIQC

SEQ ID NO: 37985 - protein, 9 aa, synthetic construct
SIEFGPAEF

SEQ ID NO: 37986 - protein, 9 aa, synthetic construct
VNMGGEQVY

SEQ ID NO: 37987 - protein, 11 aa, synthetic construct
FQIYEALRPRY

SEQ ID NO: 37988 - protein, 8 aa, synthetic construct
LTDSCQPY

SEQ ID NO: 37989 - protein, 9 aa, synthetic construct
LTDSCQPYR

SEQ ID NO: 37990 - protein, 9 aa, synthetic construct
LADYLHLLQ

SEQ ID NO: 37991 - protein, 11 aa, synthetic construct
YAVGGYDGQAY

SEQ ID NO: 37992 - protein, 9 aa, synthetic construct
YLLSGYTPY

SEQ ID NO: 37993 - protein, 9 aa, synthetic construct
SCEAGHVLR

SEQ ID NO: 37994 - protein, 9 aa, synthetic construct
SPLPGKVKY

SEQ ID NO: 37995 - protein, 11 aa, synthetic construct
QIFRDRTDIQC

SEQ ID NO: 37996 - protein, 8 aa, synthetic construct
GSAVGGGY

SEQ ID NO: 37997 - protein, 9 aa, synthetic construct
RLEKPALEF

SEQ ID NO: 37998 - protein, 8 aa, synthetic construct
VTLAGSEF

SEQ ID NO: 37999 - protein, 9 aa, synthetic construct
TIMAYTPTY

SEQ ID NO: 38000 - protein, 11 aa, synthetic construct
ILDTAGQEEYS

SEQ ID NO: 38001 - protein, 10 aa, synthetic construct
ILGSAVGGGY

SEQ ID NO: 38002 - protein, 9 aa, synthetic construct
VTNIPQGMV

SEQ ID NO: 38003 - protein, 8 aa, synthetic construct
VTNIPQGM

SEQ ID NO: 38004 - protein, 10 aa, synthetic construct
VSITDVDFIY

SEQ ID NO: 38005 - protein, 9 aa, synthetic construct
KSRLMFTMY

SEQ ID NO: 38006 - protein, 11 aa, synthetic construct
LILGSAVGGGY

SEQ ID NO: 38007 - protein, 8 aa, synthetic construct
DTAGQEEY

SEQ ID NO: 38008 - protein, 9 aa, synthetic construct
IYEALRPRY

SEQ ID NO: 38009 - protein, 11 aa, synthetic construct
LLVNMGGEQVY

SEQ ID NO: 38010 - protein, 10 aa, synthetic construct
SSSEQLQSYQ

SEQ ID NO: 38011 - protein, 9 aa, synthetic construct
SITDVDFIY

SEQ ID NO: 38012 - protein, 9 aa, synthetic construct
FSCEAGHVL

SEQ ID NO: 38013 - protein, 10 aa, synthetic construct
QIYEALRPRY

SEQ ID NO: 38014 - protein, 10 aa, synthetic construct
ILDTAGQEEY

SEQ ID NO: 38015 - protein, 9 aa, synthetic construct
AFEDDTGRY

SEQ ID NO: 38016 - protein, 8 aa, synthetic construct
IMAYTPTY

SEQ ID NO: 38017 - protein, 9 aa, synthetic construct
SQLAPERHY

SEQ ID NO: 38018 - protein, 11 aa, synthetic construct
CLELTDSCQPY

SEQ ID NO: 38019 - protein, 11 aa, synthetic construct
YSKLDQEDALL

SEQ ID NO: 38020 - protein, 10 aa, synthetic construct
DVDFIYQNEF

SEQ ID NO: 38021 - protein, 9 aa, synthetic construct
FKFSIELFH

SEQ ID NO: 38022 - protein, 11 aa, synthetic construct
LGDKLYAVGGY

SEQ ID NO: 38023 - protein, 11 aa, synthetic construct
PTIVPSSASAY

SEQ ID NO: 38024 - protein, 11 aa, synthetic construct
DSCQPYRSAFY

SEQ ID NO: 38025 - protein, 10 aa, synthetic construct
RIESLIDRDY

SEQ ID NO: 38026 - protein, 8 aa, synthetic construct
FEDDTGRY

SEQ ID NO: 38027 - protein, 11 aa, synthetic construct
AEAFEDDTGRY

SEQ ID NO: 38028 - protein, 10 aa, synthetic construct
TLADYLHLLQ

SEQ ID NO: 38029 - protein, 11 aa, synthetic construct
LSDKGTTPLQL

SEQ ID NO: 38030 - protein, 9 aa, synthetic construct
LDTAGQEEY

SEQ ID NO: 38031 - protein, 11 aa, synthetic construct
DVFKFSIELFH

SEQ ID NO: 38032 - protein, 10 aa, synthetic construct
EAFEDDTGRY

SEQ ID NO: 38033 - protein, 9 aa, synthetic construct
ASDIWAMGV

SEQ ID NO: 38034 - protein, 11 aa, synthetic construct
VVSITDVDFIY

SEQ ID NO: 38035 - protein, 9 aa, synthetic construct
KVDLKGPQV

SEQ ID NO: 38036 - protein, 9 aa, synthetic construct
YTHEEYISL

SEQ ID NO: 38037 - protein, 11 aa, synthetic construct
FFYVTLAGSEF

SEQ ID NO: 38038 - protein, 9 aa, synthetic construct
LPLHLNKRY

SEQ ID NO: 38039 - protein, 10 aa, synthetic construct
DQEDALLGSY

SEQ ID NO: 38040 - protein, 11 aa, synthetic construct
KMIPCDFLIPV

SEQ ID NO: 38041 - protein, 11 aa, synthetic construct
AVGGYDGQAYL

SEQ ID NO: 38042 - protein, 10 aa, synthetic construct
SVLESSVLLI

SEQ ID NO: 38043 - protein, 9 aa, synthetic construct
RLMFTMYDL

SEQ ID NO: 38044 - protein, 9 aa, synthetic construct
MLAGRPHPT

SEQ ID NO: 38045 - protein, 9 aa, synthetic construct
SLVSKGTLV

SEQ ID NO: 38046 - protein, 9 aa, synthetic construct
YLVPILTQT

SEQ ID NO: 38047 - protein, 10 aa, synthetic construct
SLKKNLVPQI

SEQ ID NO: 38048 - protein, 9 aa, synthetic construct
AVFMWTAEL

SEQ ID NO: 38049 - protein, 11 aa, synthetic construct
ALLSASQEIEM

SEQ ID NO: 38050 - protein, 9 aa, synthetic construct
GTLDQFICL

SEQ ID NO: 38051 - protein, 9 aa, synthetic construct
QLLRALKLV

SEQ ID NO: 38052 - protein, 9 aa, synthetic construct
HLAFQIYEA

SEQ ID NO: 38053 - protein, 10 aa, synthetic construct
YLVPILTQTL

SEQ ID NO: 38054 - protein, 11 aa, synthetic construct
YLVPILTQTLT

SEQ ID NO: 38055 - protein, 10 aa, synthetic construct
YLLSGYTPYT

SEQ ID NO: 38056 - protein, 11 aa, synthetic construct
TMYDLDENGFL

SEQ ID NO: 38057 - protein, 10 aa, synthetic construct
AILGGQPPNV

SEQ ID NO: 38058 - protein, 9 aa, synthetic construct
NMGGEQVYL

SEQ ID NO: 38059 - protein, 10 aa, synthetic construct
KVLLNVIQDL

SEQ ID NO: 38060 - protein, 9 aa, synthetic construct
NVLAAKIAV

SEQ ID NO: 38061 - protein, 10 aa, synthetic construct
QLAPERHYEI

SEQ ID NO: 38062 - protein, 10 aa, synthetic construct
SKLDQEDALL

SEQ ID NO: 38063 - protein, 9 aa, synthetic construct
ILGGQPPNV

SEQ ID NO: 38064 - protein, 9 aa, synthetic construct
ALLSASQEI

SEQ ID NO: 38065 - protein, 9 aa, synthetic construct
YTPTYISSV

SEQ ID NO: 38066 - protein, 9 aa, synthetic construct
FSIELFHTM

SEQ ID NO: 38067 - protein, 9 aa, synthetic construct
MVPGNAAGV

SEQ ID NO: 38068 - protein, 11 aa, synthetic construct
GFSVLESSVLL

SEQ ID NO: 38069 - protein, 9 aa, synthetic construct
LVPILTQTL

SEQ ID NO: 38070 - protein, 9 aa, synthetic construct
TLAGSEFFL

SEQ ID NO: 38071 - protein, 10 aa, synthetic construct
YMPYGMALTV

SEQ ID NO: 38072 - protein, 10 aa, synthetic construct
QALLSASQEI

SEQ ID NO: 38073 - protein, 9 aa, synthetic construct
ASQEIEMHA

SEQ ID NO: 38074 - protein, 9 aa, synthetic construct
GQFTEHQKI

SEQ ID NO: 38075 - protein, 10 aa, synthetic construct
YDLDPGAGSL

SEQ ID NO: 38076 - protein, 11 aa, synthetic construct
GMVPVALPPAA

SEQ ID NO: 38077 - protein, 10 aa, synthetic construct
GMVPVALPPA

SEQ ID NO: 38078 - protein, 10 aa, synthetic construct
MLAGRPHPTL

SEQ ID NO: 38079 - protein, 11 aa, synthetic construct
VCLLGDKLYAV

SEQ ID NO: 38080 - protein, 9 aa, synthetic construct
SIGAIMWHV

SEQ ID NO: 38081 - protein, 10 aa, synthetic construct
MMVPGNAAGV

SEQ ID NO: 38082 - protein, 10 aa, synthetic construct
FLGGTRLHPA

SEQ ID NO: 38083 - protein, 11 aa, synthetic construct
QYLVPILTQTL

SEQ ID NO: 38084 - protein, 9 aa, synthetic construct
VLAAKIAVL

SEQ ID NO: 38085 - protein, 10 aa, synthetic construct
MIPCDFLIPV

SEQ ID NO: 38086 - protein, 10 aa, synthetic construct
CLLGDKLYAV

SEQ ID NO: 38087 - protein, 9 aa, synthetic construct
VLLNVIQDL

SEQ ID NO: 38088 - protein, 9 aa, synthetic construct
ILRLEKPAL

SEQ ID NO: 38089 - protein, 10 aa, synthetic construct
FSVLESSVLL

SEQ ID NO: 38090 - protein, 9 aa, synthetic construct
YLHLLQAAA

SEQ ID NO: 38091 - protein, 10 aa, synthetic construct
TPQGELRPEV

SEQ ID NO: 38092 - protein, 11 aa, synthetic construct
YVTLAGSEFFL

SEQ ID NO: 38093 - protein, 11 aa, synthetic construct
LAHLIDGILVA

SEQ ID NO: 38094 - protein, 9 aa, synthetic construct
HLLQAAAQA

SEQ ID NO: 38095 - protein, 10 aa, synthetic construct
YTHEEYISLV

SEQ ID NO: 38096 - protein, 9 aa, synthetic construct
TLAEHKELI

SEQ ID NO: 38097 - protein, 9 aa, synthetic construct
ALTGNVNVL

SEQ ID NO: 38098 - protein, 10 aa, synthetic construct
LLVNMGGEQV

SEQ ID NO: 38099 - protein, 8 aa, synthetic construct
ELENIATL

SEQ ID NO: 38100 - protein, 9 aa, synthetic construct
RLHPAAPGA

SEQ ID NO: 38101 - protein, 9 aa, synthetic construct
VLESSVLLI

SEQ ID NO: 38102 - protein, 8 aa, synthetic construct
VLESSVLL

SEQ ID NO: 38103 - protein, 9 aa, synthetic construct
IMAYTPTYI

SEQ ID NO: 38104 - protein, 11 aa, synthetic construct
KKNLVPQINLA

SEQ ID NO: 38105 - protein, 10 aa, synthetic construct
FMWTAELENI

SEQ ID NO: 38106 - protein, 9 aa, synthetic construct
LVLNSGSGL

SEQ ID NO: 38107 - protein, 10 aa, synthetic construct
VTLAGSEFFL

SEQ ID NO: 38108 - protein, 11 aa, synthetic construct
SLNGDLLAQEA

SEQ ID NO: 38109 - protein, 11 aa, synthetic construct
LLANVAHANRV

SEQ ID NO: 38110 - protein, 11 aa, synthetic construct
FLDCCNYITEL

SEQ ID NO: 38111 - protein, 9 aa, synthetic construct
LLGDKLYAV

SEQ ID NO: 38112 - protein, 8 aa, synthetic construct
KLDQEDAL

SEQ ID NO: 38113 - protein, 11 aa, synthetic construct
TPTYISSVLQA

SEQ ID NO: 38114 - protein, 9 aa, synthetic construct
MILQAVVSL

SEQ ID NO: 38115 - protein, 10 aa, synthetic construct
HLAFQIYEAL

SEQ ID NO: 38116 - protein, 9 aa, synthetic construct
TLITFGCSI

SEQ ID NO: 38117 - protein, 10 aa, synthetic construct
TLAGSEFFLL

SEQ ID NO: 38118 - protein, 11 aa, synthetic construct
TLADYLHLLQA

SEQ ID NO: 38119 - protein, 8 aa, synthetic construct
WLLPPGTL

SEQ ID NO: 38120 - protein, 9 aa, synthetic construct
KMIPCDFLI

SEQ ID NO: 38121 - protein, 9 aa, synthetic construct
LLQAAAQAL

SEQ ID NO: 38122 - protein, 9 aa, synthetic construct
ALSRRGHRV

SEQ ID NO: 38123 - protein, 9 aa, synthetic construct
SVLESSVLL

SEQ ID NO: 38124 - protein, 9 aa, synthetic construct
ALFGQPPFA

SEQ ID NO: 38125 - protein, 11 aa, synthetic construct
RLDGSPLPGKV

SEQ ID NO: 38126 - protein, 9 aa, synthetic construct
MVPVALPPA

SEQ ID NO: 38127 - protein, 10 aa, synthetic construct
EPPGRRRELL

SEQ ID NO: 38128 - protein, 10 aa, synthetic construct
KLKLAHFAWI

SEQ ID NO: 38129 - protein, 10 aa, synthetic construct
PPRASTSSSG

SEQ ID NO: 38130 - protein, 11 aa, synthetic construct
PPRASTSSSGS

SEQ ID NO: 38131 - protein, 11 aa, synthetic construct
SGGPLMHSPYF

SEQ ID NO: 38132 - protein, 9 aa, synthetic construct
RPMVAPQSG

SEQ ID NO: 38133 - protein, 9 aa, synthetic construct
RPHPTLKGT

SEQ ID NO: 38134 - protein, 8 aa, synthetic construct
APERHYEI

SEQ ID NO: 38135 - protein, 11 aa, synthetic construct
RQVPGGRETPQ

SEQ ID NO: 38136 - protein, 9 aa, synthetic construct
LPDGRVTNI

SEQ ID NO: 38137 - protein, 11 aa, synthetic construct
AGPPRASTSSS

SEQ ID NO: 38138 - protein, 11 aa, synthetic construct
NKQPTLQAAEL

SEQ ID NO: 38139 - protein, 10 aa, synthetic construct
IPMPPSSPQP

SEQ ID NO: 38140 - protein, 11 aa, synthetic construct
KPPVSSGSGSS

SEQ ID NO: 38141 - protein, 8 aa, synthetic construct
ASRSFSEL

SEQ ID NO: 38142 - protein, 9 aa, synthetic construct
EPPGRRREL

SEQ ID NO: 38143 - protein, 9 aa, synthetic construct
VPGNAAGVA

SEQ ID NO: 38144 - protein, 11 aa, synthetic construct
LPAAPGRDPAA

SEQ ID NO: 38145 - protein, 9 aa, synthetic construct
APRRRSLKK

SEQ ID NO: 38146 - protein, 9 aa, synthetic construct
SPQPRGAPR

SEQ ID NO: 38147 - protein, 11 aa, synthetic construct
SPNGTELLVNM

SEQ ID NO: 38148 - protein, 11 aa, synthetic construct
AAEPPGRRREL

SEQ ID NO: 38149 - protein, 9 aa, synthetic construct
QPPFASRSF

SEQ ID NO: 38150 - protein, 9 aa, synthetic construct
RIKLGLKSL

SEQ ID NO: 38151 - protein, 10 aa, synthetic construct
LPTMTARQRV

SEQ ID NO: 38152 - protein, 9 aa, synthetic construct
FASRSFSEL

SEQ ID NO: 38153 - protein, 10 aa, synthetic construct
GQPPFASRSF

SEQ ID NO: 38154 - protein, 11 aa, synthetic construct
PPFASRSFSEL

SEQ ID NO: 38155 - protein, 9 aa, synthetic construct
HYMPYGMAL

SEQ ID NO: 38156 - protein, 10 aa, synthetic construct
SPQPRGAPRQ

SEQ ID NO: 38157 - protein, 10 aa, synthetic construct
LPHAGYARPW

SEQ ID NO: 38158 - protein, 11 aa, synthetic construct
GPQVDIKGPKL

SEQ ID NO: 38159 - protein, 9 aa, synthetic construct
LLRKENLDL

SEQ ID NO: 38160 - protein, 9 aa, synthetic construct
ALRPRYLEI

SEQ ID NO: 38161 - protein, 9 aa, synthetic construct
AGQEEYSAM

SEQ ID NO: 38162 - protein, 11 aa, synthetic construct
AKHPGDPQRGF

SEQ ID NO: 38163 - protein, 10 aa, synthetic construct
VPVALPPAAV

SEQ ID NO: 38164 - protein, 9 aa, synthetic construct
NPVISGEQI

SEQ ID NO: 38165 - protein, 10 aa, synthetic construct
GPPRASTSSS

SEQ ID NO: 38166 - protein, 10 aa, synthetic construct
GGPLMHSPYF

SEQ ID NO: 38167 - protein, 9 aa, synthetic construct
LAGRPHPTL

SEQ ID NO: 38168 - protein, 10 aa, synthetic construct
PPVSSGSGSS

SEQ ID NO: 38169 - protein, 11 aa, synthetic construct
APCQECSRCSL

SEQ ID NO: 38170 - protein, 8 aa, synthetic construct
PPFASRSF

SEQ ID NO: 38171 - protein, 9 aa, synthetic construct
GPLMHSPYF

SEQ ID NO: 38172 - protein, 10 aa, synthetic construct
QVPGGRETPQ

SEQ ID NO: 38173 - protein, 10 aa, synthetic construct
PPPPDGSPNI

SEQ ID NO: 38174 - protein, 10 aa, synthetic construct
RIPMPPSSPQ

SEQ ID NO: 38175 - protein, 9 aa, synthetic construct
LPNENGGTP

SEQ ID NO: 38176 - protein, 10 aa, synthetic construct
NPSDHPRAST

SEQ ID NO: 38177 - protein, 11 aa, synthetic construct
NPSDHPRASTI

SEQ ID NO: 38178 - protein, 10 aa, synthetic construct
KHPGDPQRGF

SEQ ID NO: 38179 - protein, 10 aa, synthetic construct
EPKFLCEVKL

SEQ ID NO: 38180 - protein, 9 aa, synthetic construct
IVNRNREEM

SEQ ID NO: 38181 - protein, 9 aa, synthetic construct
GPSGICLSY

SEQ ID NO: 38182 - protein, 9 aa, synthetic construct
IPMPPSSPQ

SEQ ID NO: 38183 - protein, 8 aa, synthetic construct
IPMPPSSP

SEQ ID NO: 38184 - protein, 8 aa, synthetic construct
RATASGVM

SEQ ID NO: 38185 - protein, 9 aa, synthetic construct
RSSPRTISF

SEQ ID NO: 38186 - protein, 11 aa, synthetic construct
HYMPYGMALTV

SEQ ID NO: 38187 - protein, 9 aa, synthetic construct
EHDSIRLPL

SEQ ID NO: 38188 - protein, 11 aa, synthetic construct
APRRRSLKKNL

SEQ ID NO: 38189 - protein, 11 aa, synthetic construct
FGQPPFASRSF

SEQ ID NO: 38190 - protein, 10 aa, synthetic construct
MPAVCSPGMV

SEQ ID NO: 38191 - protein, 9 aa, synthetic construct
VPGGRETPQ

SEQ ID NO: 38192 - protein, 10 aa, synthetic construct
GPSGICLSYL

SEQ ID NO: 38193 - protein, 11 aa, synthetic construct
MPPSSPQPRGA

SEQ ID NO: 38194 - protein, 11 aa, synthetic construct
TPQGELRPEVV

SEQ ID NO: 38195 - protein, 9 aa, synthetic construct
RCNQLLRAL

SEQ ID NO: 38196 - protein, 9 aa, synthetic construct
ESRETGEVV

SEQ ID NO: 38197 - protein, 11 aa, synthetic construct
SDHPRASTIFL

SEQ ID NO: 38198 - protein, 9 aa, synthetic construct
PPRASTSSS

SEQ ID NO: 38199 - protein, 9 aa, synthetic construct
SPGMVPVAL

SEQ ID NO: 38200 - protein, 10 aa, synthetic construct
MPYGMALTVI

SEQ ID NO: 38201 - protein, 10 aa, synthetic construct
NPVISGEQIV

SEQ ID NO: 38202 - protein, 9 aa, synthetic construct
KAFSKVSTL

SEQ ID NO: 38203 - protein, 9 aa, synthetic construct
VPVALPPAA

SEQ ID NO: 38204 - protein, 11 aa, synthetic construct
ILRLEKPALEF

SEQ ID NO: 38205 - protein, 10 aa, synthetic construct
RPHPTLKGTW

SEQ ID NO: 38206 - protein, 10 aa, synthetic construct
HILRLEKPAL

SEQ ID NO: 38207 - protein, 9 aa, synthetic construct
QLQSYQAEI

SEQ ID NO: 38208 - protein, 10 aa, synthetic construct
KPTHSLLRRI

SEQ ID NO: 38209 - protein, 9 aa, synthetic construct
MPYGMALTV

SEQ ID NO: 38210 - protein, 11 aa, synthetic construct
SHILRLEKPAL

SEQ ID NO: 38211 - protein, 11 aa, synthetic construct
VCSPGMVPVAL

SEQ ID NO: 38212 - protein, 8 aa, synthetic construct
VPILTQTL

SEQ ID NO: 38213 - protein, 9 aa, synthetic construct
VPILTQTLT

SEQ ID NO: 38214 - protein, 9 aa, synthetic construct
SSVLLIMSF

SEQ ID NO: 38215 - protein, 10 aa, synthetic construct
RLEKPALEFK

SEQ ID NO: 38216 - protein, 9 aa, synthetic construct
LPHAGYARP

SEQ ID NO: 38217 - protein, 11 aa, synthetic construct
AEPPGRRRELL

SEQ ID NO: 38218 - protein, 10 aa, synthetic construct
AEPPGRRREL

SEQ ID NO: 38219 - protein, 9 aa, synthetic construct
SCQPYRSAF

SEQ ID NO: 38220 - protein, 9 aa, synthetic construct
QPYRSAFYI

SEQ ID NO: 38221 - protein, 8 aa, synthetic construct
SPQPRGAP

SEQ ID NO: 38222 - protein, 10 aa, synthetic construct
QPYRSAFYIL

SEQ ID NO: 38223 - protein, 10 aa, synthetic construct
LRLEKPALEF

SEQ ID NO: 38224 - protein, 9 aa, synthetic construct
TPKMCLLEW

SEQ ID NO: 38225 - protein, 9 aa, synthetic construct
APMCLLANV

SEQ ID NO: 38226 - protein, 9 aa, synthetic construct
RVTNIPQGM

SEQ ID NO: 38227 - protein, 8 aa, synthetic construct
AGRPHPTL

SEQ ID NO: 38228 - protein, 9 aa, synthetic construct
LPPGTLDQF

SEQ ID NO: 38229 - protein, 9 aa, synthetic construct
IPCDFLIPV

SEQ ID NO: 38230 - protein, 9 aa, synthetic construct
KLKLAHFAW

SEQ ID NO: 38231 - protein, 8 aa, synthetic construct
KLKLAHFA

SEQ ID NO: 38232 - protein, 11 aa, synthetic construct
MPKVDLKGPQV

SEQ ID NO: 38233 - protein, 8 aa, synthetic construct
PPRASTSS

SEQ ID NO: 38234 - protein, 9 aa, synthetic construct
HPGDPQRGF

SEQ ID NO: 38235 - protein, 11 aa, synthetic construct
GPSGICLSYLL

SEQ ID NO: 38236 - protein, 11 aa, synthetic construct
SRIPMPPSSPQ

SEQ ID NO: 38237 - protein, 9 aa, synthetic construct
NRNREEMLL

SEQ ID NO: 38238 - protein, 8 aa, synthetic construct
NRNREEML

SEQ ID NO: 38239 - protein, 10 aa, synthetic construct
TAELENIATL

SEQ ID NO: 38240 - protein, 8 aa, synthetic construct
SLVSKGTL

SEQ ID NO: 38241 - protein, 10 aa, synthetic construct
RALKLVITAL

SEQ ID NO: 38242 - protein, 9 aa, synthetic construct
SFVNKQPTL

SEQ ID NO: 38243 - protein, 8 aa, synthetic construct
VISMRCMV

SEQ ID NO: 38244 - protein, 9 aa, synthetic construct
HLFSIGAIM

SEQ ID NO: 38245 - protein, 9 aa, synthetic construct
RWNSHGPSL

SEQ ID NO: 38246 - protein, 8 aa, synthetic construct
RGHRVHEL

SEQ ID NO: 38247 - protein, 10 aa, synthetic construct
HTMGRALLSL

SEQ ID NO: 38248 - protein, 8 aa, synthetic construct
VNRNREEM

SEQ ID NO: 38249 - protein, 10 aa, synthetic construct
SRRGHRVHEL

SEQ ID NO: 38250 - protein, 8 aa, synthetic construct
TMILQAVV

SEQ ID NO: 38251 - protein, 8 aa, synthetic construct
LRLEKPAL

SEQ ID NO: 38252 - protein, 9 aa, synthetic construct
QITPKMCLL

SEQ ID NO: 38253 - protein, 10 aa, synthetic construct
EALRPRYLEI

SEQ ID NO: 38254 - protein, 8 aa, synthetic construct
HTMGRALL

SEQ ID NO: 38255 - protein, 10 aa, synthetic construct
NVLAAKIAVL

SEQ ID NO: 38256 - protein, 9 aa, synthetic construct
LFHTMGRAL

SEQ ID NO: 38257 - protein, 8 aa, synthetic construct
YMPYGMAL

SEQ ID NO: 38258 - protein, 11 aa, synthetic construct
HSLLRRIAQQL

SEQ ID NO: 38259 - protein, 8 aa, synthetic construct
SSPRTISF

SEQ ID NO: 38260 - protein, 9 aa, synthetic construct
SWLLPPGTL

SEQ ID NO: 38261 - protein, 9 aa, synthetic construct
RRGHRVHEL

SEQ ID NO: 38262 - protein, 11 aa, synthetic construct
IFRDRTDIQCL

SEQ ID NO: 38263 - protein, 9 aa, synthetic construct
FYTIMAYTP

SEQ ID NO: 38264 - protein, 9 aa, synthetic construct
DKLLRKENL

SEQ ID NO: 38265 - protein, 9 aa, synthetic construct
LAFQIYEAL

SEQ ID NO: 38266 - protein, 9 aa, synthetic construct
LLRRIAQQL

SEQ ID NO: 38267 - protein, 8 aa, synthetic construct
LCEVKLAF

SEQ ID NO: 38268 - protein, 8 aa, synthetic construct
LGDKLYAV

SEQ ID NO: 38269 - protein, 9 aa, synthetic construct
MGVISYLSL

SEQ ID NO: 38270 - protein, 10 aa, synthetic construct
SLLRRIAQQL

SEQ ID NO: 38271 - protein, 9 aa, synthetic construct
VNRNREEML

SEQ ID NO: 38272 - protein, 9 aa, synthetic construct
MAIIRALNL

SEQ ID NO: 38273 - protein, 10 aa, synthetic construct
WVKGRKISSV

SEQ ID NO: 38274 - protein, 9 aa, synthetic construct
YTMILQAVV

SEQ ID NO: 38275 - protein, 8 aa, synthetic construct
DGKSIRTF

SEQ ID NO: 38276 - protein, 9 aa, synthetic construct
DLNMEFNPS

SEQ ID NO: 38277 - protein, 8 aa, synthetic construct
EALRPRYL

SEQ ID NO: 38278 - protein, 9 aa, synthetic construct
NFGQVPKQL

SEQ ID NO: 38279 - protein, 9 aa, synthetic construct
FLCEVKLAF

SEQ ID NO: 38280 - protein, 8 aa, synthetic construct
TLAEHKEL

SEQ ID NO: 38281 - protein, 9 aa, synthetic construct
SDHPRASTI

SEQ ID NO: 38282 - protein, 9 aa, synthetic construct
DSQKKIAKI

SEQ ID NO: 38283 - protein, 11 aa, synthetic construct
YEALRPRYLEI

SEQ ID NO: 38284 - protein, 11 aa, synthetic construct
DLKKRIESLID

SEQ ID NO: 38285 - protein, 9 aa, synthetic construct
LAPERHYEI

SEQ ID NO: 38286 - protein, 8 aa, synthetic construct
FVNKQPTL

SEQ ID NO: 38287 - protein, 9 aa, synthetic construct
NQLLRALKL

SEQ ID NO: 38288 - protein, 9 aa, synthetic construct
YEALRPRYL

SEQ ID NO: 38289 - protein, 8 aa, synthetic construct
HLFRGLSL

SEQ ID NO: 38290 - protein, 9 aa, synthetic construct
HLNKRYGAV

SEQ ID NO: 38291 - protein, 8 aa, synthetic construct
AFSKVSTL

SEQ ID NO: 38292 - protein, 8 aa, synthetic construct
SQKKIAKI

SEQ ID NO: 38293 - protein, 9 aa, synthetic construct
EDKLKLAHF

SEQ ID NO: 38294 - protein, 8 aa, synthetic construct
VLAAKIAV

SEQ ID NO: 38295 - protein, 9 aa, synthetic construct
GRETPQGEL

SEQ ID NO: 38296 - protein, 9 aa, synthetic construct
RRRSLKKNL

SEQ ID NO: 38297 - protein, 8 aa, synthetic construct
RRSLKKNL

SEQ ID NO: 38298 - protein, 9 aa, synthetic construct
RRSLKKNLV

SEQ ID NO: 38299 - protein, 10 aa, synthetic construct
KRYGAVIKRL

SEQ ID NO: 38300 - protein, 10 aa, synthetic construct
SRETGEVVSM

SEQ ID NO: 38301 - protein, 10 aa, synthetic construct
GRVTNIPQGM

SEQ ID NO: 38302 - protein, 9 aa, synthetic construct
ERSDSDQVL

SEQ ID NO: 38303 - protein, 11 aa, synthetic construct
KRIESLIDRDY

SEQ ID NO: 38304 - protein, 9 aa, synthetic construct
FHNFPSIVL

SEQ ID NO: 38305 - protein, 9 aa, synthetic construct
KRYGAVIKR

SEQ ID NO: 38306 - protein, 8 aa, synthetic construct
LRRIAQQL

SEQ ID NO: 38307 - protein, 11 aa, synthetic construct
GRSWLLPPGTL

SEQ ID NO: 38308 - protein, 10 aa, synthetic construct
SERSDSDQVL

SEQ ID NO: 38309 - protein, 9 aa, synthetic construct
IRALNLAHL

SEQ ID NO: 38310 - protein, 8 aa, synthetic construct
PRTISFRM

SEQ ID NO: 38311 - protein, 10 aa, synthetic construct
KRSSPRTISF

SEQ ID NO: 38312 - protein, 9 aa, synthetic construct
SRIKLGLKS

SEQ ID NO: 38313 - protein, 10 aa, synthetic construct
FRDRTDIQCL

SEQ ID NO: 38314 - protein, 11 aa, synthetic construct
MRFSCEAGHVL

SEQ ID NO: 38315 - protein, 10 aa, synthetic construct
RDRTDIQCLI

SEQ ID NO: 38316 - protein, 9 aa, synthetic construct
MSNPPVRAT

SEQ ID NO: 38317 - protein, 9 aa, synthetic construct
KRIESLIDR

SEQ ID NO: 38318 - protein, 9 aa, synthetic construct
DRDNAYLCF

SEQ ID NO: 38319 - protein, 9 aa, synthetic construct
FHTMGRALL

SEQ ID NO: 38320 - protein, 9 aa, synthetic construct
MRFSCEAGH

SEQ ID NO: 38321 - protein, 9 aa, synthetic construct
CQPYRSAFY

SEQ ID NO: 38322 - protein, 9 aa, synthetic construct
NAAGVAKQF

SEQ ID NO: 38323 - protein, 10 aa, synthetic construct
THYMPYGMAL

SEQ ID NO: 38324 - protein, 9 aa, synthetic construct
AHLFSIGAI

SEQ ID NO: 38325 - protein, 10 aa, synthetic construct
CRNLLDRDTF

SEQ ID NO: 38326 - protein, 9 aa, synthetic construct
ATASGVMSA

SEQ ID NO: 38327 - protein, 9 aa, synthetic construct
WRRLDGSPL

SEQ ID NO: 38328 - protein, 9 aa, synthetic construct
SKSNGRRAV

SEQ ID NO: 38329 - protein, 9 aa, synthetic construct
IGAIMWHVI

SEQ ID NO: 38330 - protein, 9 aa, synthetic construct
SRIPMPPSS

SEQ ID NO: 38331 - protein, 9 aa, synthetic construct
HYFLGGTRL

SEQ ID NO: 38332 - protein, 9 aa, synthetic construct
KTLAEHKEL

SEQ ID NO: 38333 - protein, 9 aa, synthetic construct
SRRGQFTEH

SEQ ID NO: 38334 - protein, 9 aa, synthetic construct
KHLFRGLSL

SEQ ID NO: 38335 - protein, 9 aa, synthetic construct
VRATASGVM

SEQ ID NO: 38336 - protein, 11 aa, synthetic construct
SSERSDSDQVL

SEQ ID NO: 38337 - protein, 9 aa, synthetic construct
SKLDQEDAL

SEQ ID NO: 38338 - protein, 9 aa, synthetic construct
ITFGCSIEF

SEQ ID NO: 38339 - protein, 9 aa, synthetic construct
KSLVSKGTL

SEQ ID NO: 38340 - protein, 9 aa, synthetic construct
EKPYKCEEY

SEQ ID NO: 38341 - protein, 9 aa, synthetic construct
DRTDIQCLI

SEQ ID NO: 38342 - protein, 8 aa, synthetic construct
DRTDIQCL

SEQ ID NO: 38343 - protein, 9 aa, synthetic construct
KSTSVTYTP

SEQ ID NO: 38344 - protein, 8 aa, synthetic construct
RRLDGSPL

SEQ ID NO: 38345 - protein, 9 aa, synthetic construct
SPRTISFRM

SEQ ID NO: 38346 - protein, 9 aa, synthetic construct
FFLLATMAY

SEQ ID NO: 38347 - protein, 9 aa, synthetic construct
MRMDSQKKI

SEQ ID NO: 38348 - protein, 10 aa, synthetic construct
SRIKLGLKSL

SEQ ID NO: 38349 - protein, 9 aa, synthetic construct
FYSKLDQED

SEQ ID NO: 38350 - protein, 9 aa, synthetic construct
AELENIATL

SEQ ID NO: 38351 - protein, 9 aa, synthetic construct
LRSEGLITE

SEQ ID NO: 38352 - protein, 10 aa, synthetic construct
FHYFLGGTRL

SEQ ID NO: 38353 - protein, 10 aa, synthetic construct
IYEALRPRYL

SEQ ID NO: 38354 - protein, 11 aa, synthetic construct
FYVTLAGSEFF

SEQ ID NO: 38355 - protein, 10 aa, synthetic construct
LYTHEEYISL

SEQ ID NO: 38356 - protein, 8 aa, synthetic construct
FHTMGRAL

SEQ ID NO: 38357 - protein, 8 aa, synthetic construct
THEEYISL

SEQ ID NO: 38358 - protein, 9 aa, synthetic construct
HYGSSAYGL

SEQ ID NO: 38359 - protein, 11 aa, synthetic construct
FYTIMAYTPTY

SEQ ID NO: 38360 - protein, 9 aa, synthetic construct
IWAMGVISY

SEQ ID NO: 38361 - protein, 11 aa, synthetic construct
FYSKLDQEDAL

SEQ ID NO: 38362 - protein, 9 aa, synthetic construct
QYLVPILTQ

SEQ ID NO: 38363 - protein, 15 aa, synthetic construct
VTYTPTIVPSSASAY

SEQ ID NO: 38364 - protein, 15 aa, synthetic construct
PQIILSGSQLAPERH

SEQ ID NO: 38365 - protein, 15 aa, synthetic construct
RSLKKNLVPQINLAS

SEQ ID NO: 38366 - protein, 15 aa, synthetic construct
NPPVRATASGVMSAP

SEQ ID NO: 38367 - protein, 15 aa, synthetic construct
VPDYLMYSTVSGSEK

SEQ ID NO: 38368 - protein, 15 aa, synthetic construct
ETGEVVSMKRMVHDG

SEQ ID NO: 38369 - protein, 15 aa, synthetic construct
LNMEFNPSDHPRAST

SEQ ID NO: 38370 - protein, 15 aa, synthetic construct
DFEPKFLCEVKLAFK

SEQ ID NO: 38371 - protein, 15 aa, synthetic construct
PTMAIIRALNLAHLI

SEQ ID NO: 38372 - protein, 15 aa, synthetic construct
PTPPTMAIIRALNLA

SEQ ID NO: 38373 - protein, 15 aa, synthetic construct
TNTLAKANKWTGHNV

SEQ ID NO: 38374 - protein, 15 aa, synthetic construct
TLGENIADNGGLKAA

SEQ ID NO: 38375 - protein, 15 aa, synthetic construct
GHSLQRHHSVEAAGP

SEQ ID NO: 38376 - protein, 15 aa, synthetic construct
PMCLLANVAHANRVR

SEQ ID NO: 38377 - protein, 15 aa, synthetic construct
TPTIVPSSASAYVSE

SEQ ID NO: 38378 - protein, 15 aa, synthetic construct
ELPLHLNKRYGAVIK

SEQ ID NO: 38379 - protein, 15 aa, synthetic construct
SEMMSNPPVRATASG

SEQ ID NO: 38380 - protein, 15 aa, synthetic construct
HRELPLHLNKRYGAV

SEQ ID NO: 38381 - protein, 15 aa, synthetic construct
SLKKNLVPQINLASS

SEQ ID NO: 38382 - protein, 15 aa, synthetic construct
QTYWLDPAKTLAEHK

SEQ ID NO: 38383 - protein, 15 aa, synthetic construct
RELPLHLNKRYGAVI

SEQ ID NO: 38384 - protein, 15 aa, synthetic construct
GKAFSKVSTLNTHKA

SEQ ID NO: 38385 - protein, 15 aa, synthetic construct
MAIIRALNLAHLIDG

SEQ ID NO: 38386 - protein, 15 aa, synthetic construct
PPTMAIIRALNLAHL

SEQ ID NO: 38387 - protein, 15 aa, synthetic construct
HLFRGLSLNGDLLAQ

SEQ ID NO: 38388 - protein, 15 aa, synthetic construct
IAPMCLLANVAHANR

SEQ ID NO: 38389 - protein, 15 aa, synthetic construct
RTNTLAKANKWTGHN

SEQ ID NO: 38390 - protein, 15 aa, synthetic construct
EEYISLVLNSGSGLS

SEQ ID NO: 38391 - protein, 15 aa, synthetic construct
LPLHLNKRYGAVIKR

SEQ ID NO: 38392 - protein, 15 aa, synthetic construct
ERHYEISRDGRLRSR

SEQ ID NO: 38393 - protein, 15 aa, synthetic construct
NIADNGGLKAAYRAY

SEQ ID NO: 38394 - protein, 15 aa, synthetic construct
ENIADNGGLKAAYRA

SEQ ID NO: 38395 - protein, 15 aa, synthetic construct
EKIKVLLNVIQDLEK

SEQ ID NO: 38396 - protein, 15 aa, synthetic construct
SASFVNKQPTLQAAE

SEQ ID NO: 38397 - protein, 15 aa, synthetic construct
SIRTFKESPKQILDP

SEQ ID NO: 38398 - protein, 15 aa, synthetic construct
SASQEIEMHADNPAA

SEQ ID NO: 38399 - protein, 15 aa, synthetic construct
LKKNLVPQINLASSF

SEQ ID NO: 38400 - protein, 15 aa, synthetic construct
AKRYHMDASGEAVSE

SEQ ID NO: 38401 - protein, 15 aa, synthetic construct
LDQEDALLGSYPVDD

SEQ ID NO: 38402 - protein, 15 aa, synthetic construct
SQLAPERHYEISRDG

SEQ ID NO: 38403 - protein, 15 aa, synthetic construct
PDALTGNVNVLAAKI

SEQ ID NO: 38404 - protein, 15 aa, synthetic construct
DISSNAAILGGQPPN

SEQ ID NO: 38405 - protein, 15 aa, synthetic construct
FRGLSLNGDLLAQEA

SEQ ID NO: 38406 - protein, 15 aa, synthetic construct
RGLSLNGDLLAQEAQ

SEQ ID NO: 38407 - protein, 15 aa, synthetic construct
PERHYEISRDGRLRS

SEQ ID NO: 38408 - protein, 15 aa, synthetic construct
LPTMTARQRVWRAFE

SEQ ID NO: 38409 - protein, 15 aa, synthetic construct
RSWQPVSRIPMPPSS

SEQ ID NO: 38410 - protein, 15 aa, synthetic construct
DNGGLKAAYRAYQNW

SEQ ID NO: 38411 - protein, 15 aa, synthetic construct
KKRIESLIDRDYMER

SEQ ID NO: 38412 - protein, 15 aa, synthetic construct
RHTLGENIADNGGLK

SEQ ID NO: 38413 - protein, 15 aa, synthetic construct
KIIIVNRNREEMLLN

SEQ ID NO: 38414 - protein, 15 aa, synthetic construct
KGRKISSVDRILTAL

SEQ ID NO: 38415 - protein, 15 aa, synthetic construct
SLNLLPEAKHPGDPQ

SEQ ID NO: 38416 - protein, 15 aa, synthetic construct
KRYHMDASGEAVSET

SEQ ID NO: 38417 - protein, 15 aa, synthetic construct
GIQVLPDGRVTNIPQ

SEQ ID NO: 38418 - protein, 15 aa, synthetic construct
PRRRSLKKNLVPQIN

SEQ ID NO: 38419 - protein, 15 aa, synthetic construct
GSQLAPERHYEISRD

SEQ ID NO: 38420 - protein, 15 aa, synthetic construct
PNDISSNAAILGGQP

SEQ ID NO: 38421 - protein, 15 aa, synthetic construct
NKWTGHNVTVVQRTN

SEQ ID NO: 38422 - protein, 15 aa, synthetic construct
IKSLFHNFPSIVLPN

SEQ ID NO: 38423 - protein, 15 aa, synthetic construct
LGENIADNGGLKAAY

SEQ ID NO: 38424 - protein, 15 aa, synthetic construct
ADNGGLKAAYRAYQN

SEQ ID NO: 38425 - protein, 15 aa, synthetic construct
KGIQVLPDGRVTNIP

SEQ ID NO: 38426 - protein, 15 aa, synthetic construct
YISLVLNSGSGLSHD

SEQ ID NO: 38427 - protein, 15 aa, synthetic construct
DPQRGFKPKTRTPEE

SEQ ID NO: 38428 - protein, 15 aa, synthetic construct
DSQKKIAKINVGKRI

SEQ ID NO: 38429 - protein, 15 aa, synthetic construct
TGHNVTVVQRTNTQP

SEQ ID NO: 38430 - protein, 15 aa, synthetic construct
YVTFSPNGTELLVNM

SEQ ID NO: 38431 - protein, 15 aa, synthetic construct
RGQFTEHQKIHTGVK

SEQ ID NO: 38432 - protein, 15 aa, synthetic construct
ENIADNGGLKAAYRV

SEQ ID NO: 38433 - protein, 15 aa, synthetic construct
PKSLNLLPEAKHPGD

SEQ ID NO: 38434 - protein, 15 aa, synthetic construct
ISLVLNSGSGLSHDY

SEQ ID NO: 38435 - protein, 15 aa, synthetic construct
VIPNDISSNAAILGG

SEQ ID NO: 38436 - protein, 15 aa, synthetic construct
CGKAFSKVSTLNTHK

SEQ ID NO: 38437 - protein, 15 aa, synthetic construct
LKSLVSKGTLVQTKG

SEQ ID NO: 38438 - protein, 15 aa, synthetic construct
HTLGENIADNGGLKA

SEQ ID NO: 38439 - protein, 15 aa, synthetic construct
DQEDALLGSYPVDDG

SEQ ID NO: 38440 - protein, 15 aa, synthetic construct
LSGSQLAPERHYEIS

SEQ ID NO: 38441 - protein, 15 aa, synthetic construct
QIISLMDKLLRKENL

SEQ ID NO: 38442 - protein, 15 aa, synthetic construct
KSLNLLPEAKHPGDP

SEQ ID NO: 38443 - protein, 15 aa, synthetic construct
NSRIKLGLKSLVSKG

SEQ ID NO: 38444 - protein, 15 aa, synthetic construct
KAKRYHMDASGEAVS

SEQ ID NO: 38445 - protein, 15 aa, synthetic construct
FIKSLFHNFPSIVLP

SEQ ID NO: 38446 - protein, 15 aa, synthetic construct
TMAIIRALNLAHLID

SEQ ID NO: 38447 - protein, 15 aa, synthetic construct
KIKVLLNVIQDLEKA

SEQ ID NO: 38448 - protein, 15 aa, synthetic construct
GHNVTVVQRTNTQPF

SEQ ID NO: 38449 - protein, 15 aa, synthetic construct
GENIADNGGLKAAYR

SEQ ID NO: 38450 - protein, 15 aa, synthetic construct
RHYEISRDGRLRSRS

SEQ ID NO: 38451 - protein, 15 aa, synthetic construct
SSSLKRSSPRTISFR

SEQ ID NO: 38452 - protein, 15 aa, synthetic construct
LSHSSKIIIVNRNRE

SEQ ID NO: 38453 - protein, 15 aa, synthetic construct
PRTISFRMKPKKENS

SEQ ID NO: 38454 - protein, 15 aa, synthetic construct
EPKFLCEVKLAFKCD

SEQ ID NO: 38455 - protein, 15 aa, synthetic construct
RRGQFTEHQKIHTGV

SEQ ID NO: 38456 - protein, 15 aa, synthetic construct
ILQIISLMDKLLRKE

SEQ ID NO: 38457 - protein, 15 aa, synthetic construct
LQIISLMDKLLRKEN

SEQ ID NO: 38458 - protein, 15 aa, synthetic construct
TSGWKVVKTSVQWCA

SEQ ID NO: 38459 - protein, 15 aa, synthetic construct
LILQIISLMDKLLRK

SEQ ID NO: 38460 - protein, 15 aa, synthetic construct
NKRYGAVIKRLSHLE

SEQ ID NO: 38461 - protein, 15 aa, synthetic construct
LAALLKSKSNGRRAV

SEQ ID NO: 38462 - protein, 15 aa, synthetic construct
NVDSEMMSNPPVRAT

SEQ ID NO: 38463 - protein, 15 aa, synthetic construct
VRSGFAMAGHENLSH

SEQ ID NO: 38464 - protein, 15 aa, synthetic construct
HHSVEAAGPPRASTS

SEQ ID NO: 38465 - protein, 15 aa, synthetic construct
CLLANVAHANRVRVG

SEQ ID NO: 38466 - protein, 15 aa, synthetic construct
FPQIFRDRTDIQCLI

SEQ ID NO: 38467 - protein, 15 aa, synthetic construct
EYISLVLNSGSGLSH

SEQ ID NO: 38468 - protein, 15 aa, synthetic construct
ITVSPNEKHLFRGLS

SEQ ID NO: 38469 - protein, 15 aa, synthetic construct
SSKIIIVNRNREEML

SEQ ID NO: 38470 - protein, 15 aa, synthetic construct
GRKISSVDRILTALA

SEQ ID NO: 38471 - protein, 15 aa, synthetic construct
LNLLPEAKHPGDPQR

SEQ ID NO: 38472 - protein, 15 aa, synthetic construct
GEEVEKSTSVTYTPT

SEQ ID NO: 38473 - protein, 15 aa, synthetic construct
MCLLANVAHANRVRV

SEQ ID NO: 38474 - protein, 15 aa, synthetic construct
HSLQRHHSVEAAGPP

SEQ ID NO: 38475 - protein, 15 aa, synthetic construct
APMCLLANVAHANRV

SEQ ID NO: 38476 - protein, 15 aa, synthetic construct
IIIVNRNREEMLLNS

SEQ ID NO: 38477 - protein, 15 aa, synthetic construct
FPQIILSGSQLAPER

SEQ ID NO: 38478 - protein, 15 aa, synthetic construct
FVSNFGQVPKQLFTK

SEQ ID NO: 38479 - protein, 15 aa, synthetic construct
NNSRIKLGLKSLVSK

SEQ ID NO: 38480 - protein, 15 aa, synthetic construct
HSSKIIIVNRNREEM

SEQ ID NO: 38481 - protein, 15 aa, synthetic construct
QKKGIQVLPDGRVTN

SEQ ID NO: 38482 - protein, 15 aa, synthetic construct
SQEIEMHADNPAAIQ

SEQ ID NO: 38483 - protein, 15 aa, synthetic construct
RRRSLKKNLVPQINL

SEQ ID NO: 38484 - protein, 15 aa, synthetic construct
NIADNGGLKAAYRVW

SEQ ID NO: 38485 - protein, 15 aa, synthetic construct
LNKRYGAVIKRLSHL

SEQ ID NO: 38486 - protein, 15 aa, synthetic construct
GLKSLVSKGTLVQTK

SEQ ID NO: 38487 - protein, 15 aa, synthetic construct
VKGRKISSVDRILTA

SEQ ID NO: 38488 - protein, 15 aa, synthetic construct
KEKYTLEQALLSASQ

SEQ ID NO: 38489 - protein, 15 aa, synthetic construct
PQIFRDRTDIQCLIP

SEQ ID NO: 38490 - protein, 15 aa, synthetic construct
KSLFHNFPSIVLPNE

SEQ ID NO: 38491 - protein, 15 aa, synthetic construct
QEKIKVLLNVIQDLE

SEQ ID NO: 38492 - protein, 15 aa, synthetic construct
VDSEMMSNPPVRATA

SEQ ID NO: 38493 - protein, 15 aa, synthetic construct
ASQEIEMHADNPAAI

SEQ ID NO: 38494 - protein, 15 aa, synthetic construct
GQPPNVTSNSGILGV

SEQ ID NO: 38495 - protein, 15 aa, synthetic construct
SKIIIVNRNREEMLL

SEQ ID NO: 38496 - protein, 15 aa, synthetic construct
ANKWTGHNVTVVQRT

SEQ ID NO: 38497 - protein, 15 aa, synthetic construct
DSEMMSNPPVRATAS

SEQ ID NO: 38498 - protein, 15 aa, synthetic construct
KKNLVPQINLASSFF

SEQ ID NO: 38499 - protein, 15 aa, synthetic construct
IPNDISSNAAILGGQ

SEQ ID NO: 38500 - protein, 15 aa, synthetic construct
RHHSVEAAGPPRAST

SEQ ID NO: 38501 - protein, 15 aa, synthetic construct
RSGFAMAGHENLSHG

SEQ ID NO: 38502 - protein, 15 aa, synthetic construct
NPDALTGNVNVLAAK

SEQ ID NO: 38503 - protein, 15 aa, synthetic construct
KKGIQVLPDGRVTNI

SEQ ID NO: 38504 - protein, 15 aa, synthetic construct
YLLSGYTPYTKPDAI

SEQ ID NO: 38505 - protein, 15 aa, synthetic construct
LLANVAHANRVRVGS

SEQ ID NO: 38506 - protein, 15 aa, synthetic construct
DPRWMLAGRPHPTLK

SEQ ID NO: 38507 - protein, 15 aa, synthetic construct
PTIVPSSASAYVSEE

SEQ ID NO: 38508 - protein, 15 aa, synthetic construct
LFRGLSLNGDLLAQE

SEQ ID NO: 38509 - protein, 15 aa, synthetic construct
SGSQLAPERHYEISR

SEQ ID NO: 38510 - protein, 15 aa, synthetic construct
KANKWTGHNVTVVQR

SEQ ID NO: 38511 - protein, 15 aa, synthetic construct
SHSSKIIIVNRNREE

SEQ ID NO: 38512 - protein, 15 aa, synthetic construct
TGEVVSMKRMVHDGT

SEQ ID NO: 38513 - protein, 15 aa, synthetic construct
SRRGQFTEHQKIHTG

SEQ ID NO: 38514 - protein, 15 aa, synthetic construct
DALTGNVNVLAAKIA

SEQ ID NO: 38515 - protein, 15 aa, synthetic construct
RNPDALTGNVNVLAA

SEQ ID NO: 38516 - protein, 15 aa, synthetic construct
PLPGKVKYSKSQAIL

SEQ ID NO: 38517 - protein, 15 aa, synthetic construct
SPRTISFRMKPKKEN

SEQ ID NO: 38518 - protein, 15 aa, synthetic construct
SPLPGKVKYSKSQAI

SEQ ID NO: 38519 - protein, 15 aa, synthetic construct
TYTPTIVPSSASAYV

SEQ ID NO: 38520 - protein, 15 aa, synthetic construct
SQKKIAKINVGKRIA

SEQ ID NO: 38521 - protein, 15 aa, synthetic construct
YTPTIVPSSASAYVS

SEQ ID NO: 38522 - protein, 15 aa, synthetic construct
VSNFGQVPKQLFTKP

SEQ ID NO: 38523 - protein, 15 aa, synthetic construct
AGGLLVFPPAFYGAK

SEQ ID NO: 38524 - protein, 15 aa, synthetic construct
RRSLKKNLVPQINLA

SEQ ID NO: 38525 - protein, 15 aa, synthetic construct
RTFKESPKQILDPAA

SEQ ID NO: 38526 - protein, 15 aa, synthetic construct
NDISSNAAILGGQPP

SEQ ID NO: 38527 - protein, 15 aa, synthetic construct
TYVTFSPNGTELLVN

SEQ ID NO: 38528 - protein, 15 aa, synthetic construct
NMEFNPSDHPRASTI

SEQ ID NO: 38529 - protein, 15 aa, synthetic construct
TPPTMAIIRALNLAH

SEQ ID NO: 38530 - protein, 15 aa, synthetic construct
KSIRTFKESPKQILD

SEQ ID NO: 38531 - protein, 15 aa, synthetic construct
IRTFKESPKQILDPA

SEQ ID NO: 38532 - protein, 15 aa, synthetic construct
PNEKHLFRGLSLNGD

SEQ ID NO: 38533 - protein, 15 aa, synthetic construct
QEEYSAMRDQYMRTG

SEQ ID NO: 38534 - protein, 15 aa, synthetic construct
DQLLLPHAGYARPWS

SEQ ID NO: 38535 - protein, 15 aa, synthetic construct
QNEAVFMWTAELENI

SEQ ID NO: 38536 - protein, 15 aa, synthetic construct
MGVISYLSLTCSSPF

SEQ ID NO: 38537 - protein, 15 aa, synthetic construct
QAVVSLSSADARQKA

SEQ ID NO: 38538 - protein, 15 aa, synthetic construct
WAIIKSYDLDPGAGS

SEQ ID NO: 38539 - protein, 15 aa, synthetic construct
PGTVMRFSCEAGHVL

SEQ ID NO: 38540 - protein, 15 aa, synthetic construct
GDGKSIRTFKESPKQ

SEQ ID NO: 38541 - protein, 15 aa, synthetic construct
VVKTSVQWCAPIVPA

SEQ ID NO: 38542 - protein, 15 aa, synthetic construct
SNQEKIKVLLNVIQD

SEQ ID NO: 38543 - protein, 15 aa, synthetic construct
KRIESLIDRDYMERD

SEQ ID NO: 38544 - protein, 15 aa, synthetic construct
TVMRFSCEAGHVLRG

SEQ ID NO: 38545 - protein, 15 aa, synthetic construct
MRCMVQFVGREAKYS

SEQ ID NO: 38546 - protein, 15 aa, synthetic construct
GTVMRFSCEAGHVLR

SEQ ID NO: 38547 - protein, 15 aa, synthetic construct
EAVFMWTAELENIAT

SEQ ID NO: 38548 - protein, 15 aa, synthetic construct
LYAVGGYDGQAYLNT

SEQ ID NO: 38549 - protein, 15 aa, synthetic construct
GQEEYSAMRDQYMRT

SEQ ID NO: 38550 - protein, 15 aa, synthetic construct
TGNVNVLAAKIAVLS

SEQ ID NO: 38551 - protein, 15 aa, synthetic construct
LAFQIYEALRPRYLE

SEQ ID NO: 38552 - protein, 15 aa, synthetic construct
DLDQTVVSITDVDFI

SEQ ID NO: 38553 - protein, 15 aa, synthetic construct
FDPGTVMRFSCEAGH

SEQ ID NO: 38554 - protein, 15 aa, synthetic construct
DPGTVMRFSCEAGHV

SEQ ID NO: 38555 - protein, 15 aa, synthetic construct
QAPFHYFLGGTRLHP

SEQ ID NO: 38556 - protein, 15 aa, synthetic construct
EAGGLLVFPPAFYGA

SEQ ID NO: 38557 - protein, 15 aa, synthetic construct
LIKSTILGFVSNFGQ

SEQ ID NO: 38558 - protein, 15 aa, synthetic construct
QTVVSITDVDFIYQN

SEQ ID NO: 38559 - protein, 15 aa, synthetic construct
STILGFVSNFGQVPK

SEQ ID NO: 38560 - protein, 15 aa, synthetic construct
FSKVSTLNTHKAIHA

SEQ ID NO: 38561 - protein, 15 aa, synthetic construct
KVLLNVIQDLEKARA

SEQ ID NO: 38562 - protein, 15 aa, synthetic construct
ALQYLVPILTQTLTK

SEQ ID NO: 38563 - protein, 15 aa, synthetic construct
VKTSVQWCAPIVPAT

SEQ ID NO: 38564 - protein, 15 aa, synthetic construct
SLFHNFPSIVLPNEN

SEQ ID NO: 38565 - protein, 15 aa, synthetic construct
GDKLYAVGGYDGQAY

SEQ ID NO: 38566 - protein, 15 aa, synthetic construct
SKLDQEDALLGSYPV

SEQ ID NO: 38567 - protein, 15 aa, synthetic construct
NQEKIKVLLNVIQDL

SEQ ID NO: 38568 - protein, 15 aa, synthetic construct
SITDVDFIYQNEFLG

SEQ ID NO: 38569 - protein, 15 aa, synthetic construct
ALMILVAIGFKTKLA

SEQ ID NO: 38570 - protein, 15 aa, synthetic construct
DISWRRLDGSPLPGK

SEQ ID NO: 38571 - protein, 15 aa, synthetic construct
YDPKLQMQEGVRSGF

SEQ ID NO: 38572 - protein, 15 aa, synthetic construct
QEDALLGSYPVDDGC

SEQ ID NO: 38573 - protein, 15 aa, synthetic construct
LSYLLSGYTPYTKPD

SEQ ID NO: 38574 - protein, 15 aa, synthetic construct
LKKRIESLIDRDYME

SEQ ID NO: 38575 - protein, 15 aa, synthetic construct
SYLLSGYTPYTKPDA

SEQ ID NO: 38576 - protein, 15 aa, synthetic construct
KSTILGFVSNFGQVP

SEQ ID NO: 38577 - protein, 15 aa, synthetic construct
QYLVPILTQTLTKQD

SEQ ID NO: 38578 - protein, 15 aa, synthetic construct
EDALLGSYPVDDGCR

SEQ ID NO: 38579 - protein, 15 aa, synthetic construct
NGTELLVNMGGEQVY

SEQ ID NO: 38580 - protein, 15 aa, synthetic construct
TQDQLLLPHAGYARP

SEQ ID NO: 38581 - protein, 15 aa, synthetic construct
GKSIRTFKESPKQIL

SEQ ID NO: 38582 - protein, 15 aa, synthetic construct
VSETLQFKAQDLLRA

SEQ ID NO: 38583 - protein, 15 aa, synthetic construct
LQYLVPILTQTLTKQ

SEQ ID NO: 38584 - protein, 15 aa, synthetic construct
GEAGGLLVFPPAFYG

SEQ ID NO: 38585 - protein, 15 aa, synthetic construct
GMQMFFYVTLAGSEF

SEQ ID NO: 38586 - protein, 15 aa, synthetic construct
THSLLRRIAQQLPRQ

SEQ ID NO: 38587 - protein, 15 aa, synthetic construct
IKSTILGFVSNFGQV

SEQ ID NO: 38588 - protein, 15 aa, synthetic construct
TELLVNMGGEQVYLF

SEQ ID NO: 38589 - protein, 15 aa, synthetic construct
RCMVQFVGREAKYSG

SEQ ID NO: 38590 - protein, 15 aa, synthetic construct
YAVGGYDGQAYLNTV

SEQ ID NO: 38591 - protein, 15 aa, synthetic construct
DKLYAVGGYDGQAYL

SEQ ID NO: 38592 - protein, 15 aa, synthetic construct
LYTHEEYISLVLNSG

SEQ ID NO: 38593 - protein, 15 aa, synthetic construct
PDYLMYSTVSGSEKN

SEQ ID NO: 38594 - protein, 15 aa, synthetic construct
AYTPTYISSVLQANL

SEQ ID NO: 38595 - protein, 15 aa, synthetic construct
AVSETLQFKAQDLLR

SEQ ID NO: 38596 - protein, 15 aa, synthetic construct
LLGDKLYAVGGYDGQ

SEQ ID NO: 38597 - protein, 15 aa, synthetic construct
LQNEAVFMWTAELEN

SEQ ID NO: 38598 - protein, 15 aa, synthetic construct
GVILYEALFGQPPFA

SEQ ID NO: 38599 - protein, 15 aa, synthetic construct
DCNVPDYLMYSTVSG

SEQ ID NO: 38600 - protein, 15 aa, synthetic construct
AIIKSYDLDPGAGSL

SEQ ID NO: 38601 - protein, 15 aa, synthetic construct
DRTDIQCLIPCAIDQ

SEQ ID NO: 38602 - protein, 15 aa, synthetic construct
VNCIDWVKGRKISSV

SEQ ID NO: 38603 - protein, 15 aa, synthetic construct
DLKKRIESLIDRDYM

SEQ ID NO: 38604 - protein, 15 aa, synthetic construct
KLYAVGGYDGQAYLN

SEQ ID NO: 38605 - protein, 15 aa, synthetic construct
WAMGVISYLSLTCSS

SEQ ID NO: 38606 - protein, 15 aa, synthetic construct
IWAMGVISYLSLTCS

SEQ ID NO: 38607 - protein, 15 aa, synthetic construct
GTALMILVAIGFKTK

SEQ ID NO: 38608 - protein, 15 aa, synthetic construct
QDQLILQIISLMDKL

SEQ ID NO: 38609 - protein, 15 aa, synthetic construct
AFSKVSTLNTHKAIH

SEQ ID NO: 38610 - protein, 15 aa, synthetic construct
DQTVVSITDVDFIYQ

SEQ ID NO: 38611 - protein, 15 aa, synthetic construct
NCIDWVKGRKISSVD

SEQ ID NO: 38612 - protein, 15 aa, synthetic construct
ALVNCIDWVKGRKIS

SEQ ID NO: 38613 - protein, 15 aa, synthetic construct
DPKLQMQEGVRSGFA

SEQ ID NO: 38614 - protein, 15 aa, synthetic construct
VHLAFQIYEALRPRY

SEQ ID NO: 38615 - protein, 15 aa, synthetic construct
GWAIIKSYDLDPGAG

SEQ ID NO: 38616 - protein, 15 aa, synthetic construct
TDVDFIYQNEFLGCT

SEQ ID NO: 38617 - protein, 15 aa, synthetic construct
EFFIHGFSVLESSVL

SEQ ID NO: 38618 - protein, 15 aa, synthetic construct
LVHLAFQIYEALRPR

SEQ ID NO: 38619 - protein, 15 aa, synthetic construct
SMRCMVQFVGREAKY

SEQ ID NO: 38620 - protein, 15 aa, synthetic construct
KFSIELFHTMGRALL

SEQ ID NO: 38621 - protein, 15 aa, synthetic construct
SEQLQSYQAEIIELR

SEQ ID NO: 38622 - protein, 15 aa, synthetic construct
LFHNFPSIVLPNENG

SEQ ID NO: 38623 - protein, 15 aa, synthetic construct
LTGNVNVLAAKIAVL

SEQ ID NO: 38624 - protein, 15 aa, synthetic construct
GTELLVNMGGEQVYL

SEQ ID NO: 38625 - protein, 15 aa, synthetic construct
KLDQEDALLGSYPVD

SEQ ID NO: 38626 - protein, 15 aa, synthetic construct
ALNLAHLIDGILVAP

SEQ ID NO: 38627 - protein, 15 aa, synthetic construct
ITDVDFIYQNEFLGC

SEQ ID NO: 38628 - protein, 15 aa, synthetic construct
PDISWRRLDGSPLPG

SEQ ID NO: 38629 - protein, 15 aa, synthetic construct
KTSVQWCAPIVPATQ

SEQ ID NO: 38630 - protein, 15 aa, synthetic construct
DVDFIYQNEFLGCTD

SEQ ID NO: 38631 - protein, 15 aa, synthetic construct
AMGVISYLSLTCSSP

SEQ ID NO: 38632 - protein, 15 aa, synthetic construct
TALMILVAIGFKTKL

SEQ ID NO: 38633 - protein, 15 aa, synthetic construct
LGDKLYAVGGYDGQA

SEQ ID NO: 38634 - protein, 15 aa, synthetic construct
LQAVVSLSSADARQK

SEQ ID NO: 38635 - protein, 15 aa, synthetic construct
VGTALMILVAIGFKT

SEQ ID NO: 38636 - protein, 15 aa, synthetic construct
FKFSIELFHTMGRAL

SEQ ID NO: 38637 - protein, 15 aa, synthetic construct
ILQAVVSLSSADARQ

SEQ ID NO: 38638 - protein, 15 aa, synthetic construct
DGKSIRTFKESPKQI

SEQ ID NO: 38639 - protein, 15 aa, synthetic construct
RTDIQCLIPCAIDQD

SEQ ID NO: 38640 - protein, 15 aa, synthetic construct
MAYTPTYISSVLQAN

SEQ ID NO: 38641 - protein, 15 aa, synthetic construct
HLAFQIYEALRPRYL

SEQ ID NO: 38642 - protein, 15 aa, synthetic construct
NEAVFMWTAELENIA

SEQ ID NO: 38643 - protein, 15 aa, synthetic construct
VMRFSCEAGHVLRGS

SEQ ID NO: 38644 - protein, 15 aa, synthetic construct
NVPDYLMYSTVSGSE

SEQ ID NO: 38645 - protein, 15 aa, synthetic construct
VFKFSIELFHTMGRA

SEQ ID NO: 38646 - protein, 15 aa, synthetic construct
QLILQIISLMDKLLR

SEQ ID NO: 38647 - protein, 15 aa, synthetic construct
LAKANKWTGHNVTVV

SEQ ID NO: 38648 - protein, 15 aa, synthetic construct
AQEFFIHGFSVLESS

SEQ ID NO: 38649 - protein, 15 aa, synthetic construct
ISMRCMVQFVGREAK

SEQ ID NO: 38650 - protein, 15 aa, synthetic construct
LDQTVVSITDVDFIY

SEQ ID NO: 38651 - protein, 15 aa, synthetic construct
SKVSTLNTHKAIHAE

SEQ ID NO: 38652 - protein, 15 aa, synthetic construct
LSASQEIEMHADNPA

SEQ ID NO: 38653 - protein, 15 aa, synthetic construct
CNVPDYLMYSTVSGS

SEQ ID NO: 38654 - protein, 15 aa, synthetic construct
LVNCIDWVKGRKISS

SEQ ID NO: 38655 - protein, 15 aa, synthetic construct
GQAPFHYFLGGTRLH

SEQ ID NO: 38656 - protein, 15 aa, synthetic construct
WGWAIIKSYDLDPGA

SEQ ID NO: 38657 - protein, 15 aa, synthetic construct
QDQLLLPHAGYARPW

SEQ ID NO: 38658 - protein, 15 aa, synthetic construct
QEFFIHGFSVLESSV

SEQ ID NO: 38659 - protein, 15 aa, synthetic construct
MDSQKKIAKINVGKR

SEQ ID NO: 38660 - protein, 15 aa, synthetic construct
NVNVLAAKIAVLSSS

SEQ ID NO: 38661 - protein, 15 aa, synthetic construct
SNPPVRATASGVMSA

SEQ ID NO: 38662 - protein, 15 aa, synthetic construct
GTRLHPAAPGAPGGR

SEQ ID NO: 38663 - protein, 15 aa, synthetic construct
DGSPLPGKVKYSKSQ

SEQ ID NO: 38664 - protein, 15 aa, synthetic construct
RATASGVMSAPPVRA

SEQ ID NO: 38665 - protein, 15 aa, synthetic construct
YQLIHQGTKMIPCDF

SEQ ID NO: 38666 - protein, 15 aa, synthetic construct
QRTYSSSLKRSSPRT

SEQ ID NO: 38667 - protein, 15 aa, synthetic construct
YTPTSASFVNKQPTL

SEQ ID NO: 38668 - protein, 15 aa, synthetic construct
APFHYFLGGTRLHPA

SEQ ID NO: 38669 - protein, 15 aa, synthetic construct
QNPVSEASDIWAMGV

SEQ ID NO: 38670 - protein, 15 aa, synthetic construct
AATEVLAALLKSKSN

SEQ ID NO: 38671 - protein, 15 aa, synthetic construct
SVQWCAPIVPATQEA

SEQ ID NO: 38672 - protein, 15 aa, synthetic construct
SPGMVPVALPPAAVN

SEQ ID NO: 38673 - protein, 15 aa, synthetic construct
QGGNSTATLEPPACP

SEQ ID NO: 38674 - protein, 15 aa, synthetic construct
LLSASQEIEMHADNP

SEQ ID NO: 38675 - protein, 15 aa, synthetic construct
PGMVPVALPPAAVNA

SEQ ID NO: 38676 - protein, 15 aa, synthetic construct
NKQPTLQAAELIDSE

SEQ ID NO: 38677 - protein, 15 aa, synthetic construct
GTGESAGGSPARSLT

SEQ ID NO: 38678 - protein, 15 aa, synthetic construct
PVRATASGVMSAPPV

SEQ ID NO: 38679 - protein, 15 aa, synthetic construct
HNFPSIVLPNENGGT

SEQ ID NO: 38680 - protein, 15 aa, synthetic construct
FHYFLGGTRLHPAAP

SEQ ID NO: 38681 - protein, 15 aa, synthetic construct
TAGQEEYSAMRDQYM

SEQ ID NO: 38682 - protein, 15 aa, synthetic construct
LDGSPLPGKVKYSKS

SEQ ID NO: 38683 - protein, 15 aa, synthetic construct
CQGGNSTATLEPPAC

SEQ ID NO: 38684 - protein, 15 aa, synthetic construct
LCQGGNSTATLEPPA

SEQ ID NO: 38685 - protein, 15 aa, synthetic construct
LRYLILGSAVGGGYT

SEQ ID NO: 38686 - protein, 15 aa, synthetic construct
TGESAGGSPARSLTR

SEQ ID NO: 38687 - protein, 15 aa, synthetic construct
SRAAHALSRRGHRVH

SEQ ID NO: 38688 - protein, 15 aa, synthetic construct
FSNQAESMMVPGNAA

SEQ ID NO: 38689 - protein, 15 aa, synthetic construct
LLELQNEAVFMWTAE

SEQ ID NO: 38690 - protein, 15 aa, synthetic construct
TYWLDPAKTLAEHKE

SEQ ID NO: 38691 - protein, 15 aa, synthetic construct
DPAAGRGAEASAAGP

SEQ ID NO: 38692 - protein, 15 aa, synthetic construct
FSCEAGHVLRGSSER

SEQ ID NO: 38693 - protein, 15 aa, synthetic construct
MVPGNAAGVAKQFLR

SEQ ID NO: 38694 - protein, 15 aa, synthetic construct
SVTYTPTIVPSSASA

SEQ ID NO: 38695 - protein, 15 aa, synthetic construct
CAPIVPATQEANTGG

SEQ ID NO: 38696 - protein, 15 aa, synthetic construct
SNQAESMMVPGNAAG

SEQ ID NO: 38697 - protein, 15 aa, synthetic construct
AGESALPTMTARQRV

SEQ ID NO: 38698 - protein, 15 aa, synthetic construct
TFSPNGTELLVNMGG

SEQ ID NO: 38699 - protein, 15 aa, synthetic construct
WTGHNVTVVQRTNTQ

SEQ ID NO: 38700 - protein, 15 aa, synthetic construct
SLVSKGTLVQTKGTG

SEQ ID NO: 38701 - protein, 15 aa, synthetic construct
AAGRGAEASAAGPPG

SEQ ID NO: 38702 - protein, 15 aa, synthetic construct
KWTGHNVTVVQRTNT

SEQ ID NO: 38703 - protein, 15 aa, synthetic construct
QLIHQGTKMIPCDFL

SEQ ID NO: 38704 - protein, 15 aa, synthetic construct
YTMILQAVVSLSSAD

SEQ ID NO: 38705 - protein, 15 aa, synthetic construct
CSPGMVPVALPPAAV

SEQ ID NO: 38706 - protein, 15 aa, synthetic construct
IDWVKGRKISSVDRI

SEQ ID NO: 38707 - protein, 15 aa, synthetic construct
IILSGSQLAPERHYE

SEQ ID NO: 38708 - protein, 15 aa, synthetic construct
TPGSRAAHALSRRGH

SEQ ID NO: 38709 - protein, 15 aa, synthetic construct
PGSRAAHALSRRGHR

SEQ ID NO: 38710 - protein, 15 aa, synthetic construct
KSLVSKGTLVQTKGT

SEQ ID NO: 38711 - protein, 15 aa, synthetic construct
LVLNSGSGLSHDYAN

SEQ ID NO: 38712 - protein, 15 aa, synthetic construct
PSDHPRASTIFLSKS

SEQ ID NO: 38713 - protein, 15 aa, synthetic construct
RMDSQKKIAKINVGK

SEQ ID NO: 38714 - protein, 15 aa, synthetic construct
QIILSGSQLAPERHY

SEQ ID NO: 38715 - protein, 15 aa, synthetic construct
GSRAAHALSRRGHRV

SEQ ID NO: 38716 - protein, 15 aa, synthetic construct
MRFSCEAGHVLRGSS

SEQ ID NO: 38717 - protein, 15 aa, synthetic construct
FLGGTRLHPAAPGAP

SEQ ID NO: 38718 - protein, 15 aa, synthetic construct
YFLGGTRLHPAAPGA

SEQ ID NO: 38719 - protein, 15 aa, synthetic construct
LQMQEGVRSGFAMAG

SEQ ID NO: 38720 - protein, 15 aa, synthetic construct
NPSDHPRASTIFLSK

SEQ ID NO: 38721 - protein, 15 aa, synthetic construct
FFIHGFSVLESSVLL

SEQ ID NO: 38722 - protein, 15 aa, synthetic construct
ILSGSQLAPERHYEI

SEQ ID NO: 38723 - protein, 15 aa, synthetic construct
TQRTYSSSLKRSSPR

SEQ ID NO: 38724 - protein, 15 aa, synthetic construct
NKQVVSSSEQLQSYQ

SEQ ID NO: 38725 - protein, 15 aa, synthetic construct
PPVRATASGVMSAPP

SEQ ID NO: 38726 - protein, 15 aa, synthetic construct
WVKGRKISSVDRILT

SEQ ID NO: 38727 - protein, 15 aa, synthetic construct
PKLQMQEGVRSGFAM

SEQ ID NO: 38728 - protein, 15 aa, synthetic construct
DWVKGRKISSVDRIL

SEQ ID NO: 38729 - protein, 15 aa, synthetic construct
SGAAGGSGSSSSNSS

SEQ ID NO: 38730 - protein, 15 aa, synthetic construct
CIDWVKGRKISSVDR

SEQ ID NO: 38731 - protein, 15 aa, synthetic construct
KLRYLILGSAVGGGY

SEQ ID NO: 38732 - protein, 15 aa, synthetic construct
NPVSEASDIWAMGVI

SEQ ID NO: 38733 - protein, 15 aa, synthetic construct
DYLMYSTVSGSEKNS

SEQ ID NO: 38734 - protein, 15 aa, synthetic construct
AGQEEYSAMRDQYMR

SEQ ID NO: 38735 - protein, 15 aa, synthetic construct
RDPAAGRGAEASAAG

SEQ ID NO: 38736 - protein, 15 aa, synthetic construct
GDLHTLIIAEAFEDD

SEQ ID NO: 38737 - protein, 15 aa, synthetic construct
QQNPVSEASDIWAMG

SEQ ID NO: 38738 - protein, 15 aa, synthetic construct
SDHPRASTIFLSKSQ

SEQ ID NO: 38739 - protein, 15 aa, synthetic construct
GGDLHTLIIAEAFED

SEQ ID NO: 38740 - protein, 15 aa, synthetic construct
LELQNEAVFMWTAEL

SEQ ID NO: 38741 - protein, 15 aa, synthetic construct
HSVEAAGPPRASTSS

SEQ ID NO: 38742 - protein, 15 aa, synthetic construct
VCSPGMVPVALPPAA

SEQ ID NO: 38743 - protein, 15 aa, synthetic construct
RYLILGSAVGGGYTA

SEQ ID NO: 38744 - protein, 15 aa, synthetic construct
STSVTYTPTIVPSSA

SEQ ID NO: 38745 - protein, 15 aa, synthetic construct
RAATEVLAALLKSKS

SEQ ID NO: 38746 - protein, 15 aa, synthetic construct
PAAGRGAEASAAGPP

SEQ ID NO: 38747 - protein, 15 aa, synthetic construct
SCEAGHVLRGSSERT

SEQ ID NO: 38748 - protein, 15 aa, synthetic construct
DYTPTSASFVNKQPT

SEQ ID NO: 38749 - protein, 15 aa, synthetic construct
YLILGSAVGGGYTAK

SEQ ID NO: 38750 - protein, 15 aa, synthetic construct
TSVTYTPTIVPSSAS

SEQ ID NO: 38751 - protein, 15 aa, synthetic construct
KLQMQEGVRSGFAMA

SEQ ID NO: 38752 - protein, 15 aa, synthetic construct
TPTYISSVLQANLRD

SEQ ID NO: 38753 - protein, 15 aa, synthetic construct
DCCNYITELRRQHAR

SEQ ID NO: 38754 - protein, 15 aa, synthetic construct
LNKQVVSSSEQLQSY

SEQ ID NO: 38755 - protein, 15 aa, synthetic construct
VRATASGVMSAPPVR

SEQ ID NO: 38756 - protein, 15 aa, synthetic construct
QLQSYQAEIIELRRT

SEQ ID NO: 38757 - protein, 15 aa, synthetic construct
PFHYFLGGTRLHPAA

SEQ ID NO: 38758 - protein, 15 aa, synthetic construct
ISSNAAILGGQPPNV

SEQ ID NO: 38759 - protein, 15 aa, synthetic construct
KPPVSSGSGSSSSSS

SEQ ID NO: 38760 - protein, 15 aa, synthetic construct
VTFSPNGTELLVNMG

SEQ ID NO: 38761 - protein, 15 aa, synthetic construct
KPHFITSSVEHDSIR

SEQ ID NO: 38762 - protein, 15 aa, synthetic construct
PHFITSSVEHDSIRL

SEQ ID NO: 38763 - protein, 15 aa, synthetic construct
GNVNVLAAKIAVLSS

SEQ ID NO: 38764 - protein, 15 aa, synthetic construct
FHNFPSIVLPNENGG

SEQ ID NO: 38765 - protein, 15 aa, synthetic construct
ELENIATLCFKALEN

SEQ ID NO: 38766 - protein, 15 aa, synthetic construct
PPVSSGSGSSSSSSS

SEQ ID NO: 38767 - protein, 15 aa, synthetic construct
PWSPAEDSRIRLTAR

SEQ ID NO: 38768 - protein, 15 aa, synthetic construct
GESAGGSPARSLTRS

SEQ ID NO: 38769 - protein, 15 aa, synthetic construct
LDCCNYITELRRQHA

SEQ ID NO: 38770 - protein, 15 aa, synthetic construct
HYFLGGTRLHPAAPG

SEQ ID NO: 38771 - protein, 15 aa, synthetic construct
TSVQWCAPIVPATQE

SEQ ID NO: 38772 - protein, 15 aa, synthetic construct
RFSCEAGHVLRGSSE

SEQ ID NO: 38773 - protein, 15 aa, synthetic construct
PTQRTYSSSLKRSSP

SEQ ID NO: 38774 - protein, 15 aa, synthetic construct
TASGVMSAPPVRALD

SEQ ID NO: 38775 - protein, 15 aa, synthetic construct
ELQNEAVFMWTAELE

SEQ ID NO: 38776 - protein, 15 aa, synthetic construct
SLQRHHSVEAAGPPR

SEQ ID NO: 38777 - protein, 15 aa, synthetic construct
VQWCAPIVPATQEAN

SEQ ID NO: 38778 - protein, 15 aa, synthetic construct
RLDGSPLPGKVKYSK

SEQ ID NO: 38779 - protein, 15 aa, synthetic construct
EGGDLHTLIIAEAFE

SEQ ID NO: 38780 - protein, 15 aa, synthetic construct
QMQEGVRSGFAMAGH

SEQ ID NO: 38781 - protein, 15 aa, synthetic construct
QWCAPIVPATQEANT

SEQ ID NO: 38782 - protein, 15 aa, synthetic construct
GTTPLQLAIIRERSS

SEQ ID NO: 38783 - protein, 15 aa, synthetic construct
LSSERSDSDQVLPNE

SEQ ID NO: 38784 - protein, 15 aa, synthetic construct
EDLDQTVVSITDVDF

SEQ ID NO: 38785 - protein, 15 aa, synthetic construct
VAPQSGDPDPGASVG

SEQ ID NO: 38786 - protein, 15 aa, synthetic construct
GAKPHFITSSVEHDS

SEQ ID NO: 38787 - protein, 15 aa, synthetic construct
QVLPDGRVTNIPQGM

SEQ ID NO: 38788 - protein, 15 aa, synthetic construct
EFFLLATMAYDRYVA

SEQ ID NO: 38789 - protein, 15 aa, synthetic construct
GAIMWHVIARDFGQS

SEQ ID NO: 38790 - protein, 15 aa, synthetic construct
VLPDGRVTNIPQGMV

SEQ ID NO: 38791 - protein, 15 aa, synthetic construct
KGAKPHFITSSVEHD

SEQ ID NO: 38792 - protein, 15 aa, synthetic construct
FIYQNEFLGCTDRLV

SEQ ID NO: 38793 - protein, 15 aa, synthetic construct
GVDDKFYSKLDQEDA

SEQ ID NO: 38794 - protein, 15 aa, synthetic construct
RVTNIPQGMVTDQFG

SEQ ID NO: 38795 - protein, 15 aa, synthetic construct
VDDKFYSKLDQEDAL

SEQ ID NO: 38796 - protein, 15 aa, synthetic construct
TRNTCTTGITDPPPP

SEQ ID NO: 38797 - protein, 15 aa, synthetic construct
GSGSSSSNSSGDALV

SEQ ID NO: 38798 - protein, 15 aa, synthetic construct
ALLSASQEIEMHADN

SEQ ID NO: 38799 - protein, 15 aa, synthetic construct
GETCLLDILDTAGQE

SEQ ID NO: 38800 - protein, 15 aa, synthetic construct
NIPQGMVTDQFGMIG

SEQ ID NO: 38801 - protein, 15 aa, synthetic construct
YARPWSPAEDSRIRL

SEQ ID NO: 38802 - protein, 15 aa, synthetic construct
AKPHFITSSVEHDSI

SEQ ID NO: 38803 - protein, 15 aa, synthetic construct
ARPWSPAEDSRIRLT

SEQ ID NO: 38804 - protein, 15 aa, synthetic construct
VTNIPQGMVTDQFGM

SEQ ID NO: 38805 - protein, 15 aa, synthetic construct
FFLLATMAYDRYVAI

SEQ ID NO: 38806 - protein, 15 aa, synthetic construct
LIIAEAFEDDTGRYT

SEQ ID NO: 38807 - protein, 15 aa, synthetic construct
IDDLNMEFNPSDHPR

SEQ ID NO: 38808 - protein, 15 aa, synthetic construct
LAPERHYEISRDGRL

SEQ ID NO: 38809 - protein, 15 aa, synthetic construct
DEDLDYTPTSASFVN

SEQ ID NO: 38810 - protein, 15 aa, synthetic construct
RPWSPAEDSRIRLTA

SEQ ID NO: 38811 - protein, 15 aa, synthetic construct
APERHYEISRDGRLR

SEQ ID NO: 38812 - protein, 15 aa, synthetic construct
DKSRLMFTMYDLDEN

SEQ ID NO: 38813 - protein, 15 aa, synthetic construct
NMGGEQVYLFDLTYK

SEQ ID NO: 38814 - protein, 15 aa, synthetic construct
QALLSASQEIEMHAD

SEQ ID NO: 38815 - protein, 15 aa, synthetic construct
AVVSLSSADARQKAF

SEQ ID NO: 38816 - protein, 15 aa, synthetic construct
AGYARPWSPAEDSRI

SEQ ID NO: 38817 - protein, 15 aa, synthetic construct
TNIPQGMVTDQFGMI

SEQ ID NO: 38818 - protein, 15 aa, synthetic construct
EDLDYTPTSASFVNK

SEQ ID NO: 38819 - protein, 15 aa, synthetic construct
SGLSSERSDSDQVLP

SEQ ID NO: 38820 - protein, 15 aa, synthetic construct
ETCLLDILDTAGQEE

SEQ ID NO: 38821 - protein, 15 aa, synthetic construct
DLHTLIIAEAFEDDT

SEQ ID NO: 38822 - protein, 15 aa, synthetic construct
SRLMFTMYDLDENGF

SEQ ID NO: 38823 - protein, 15 aa, synthetic construct
MVAPQSGDPDPGASV

SEQ ID NO: 38824 - protein, 15 aa, synthetic construct
HAGYARPWSPAEDSR

SEQ ID NO: 38825 - protein, 15 aa, synthetic construct
GLSSERSDSDQVLPN

SEQ ID NO: 38826 - protein, 15 aa, synthetic construct
TVVSITDVDFIYQNE

SEQ ID NO: 38827 - protein, 15 aa, synthetic construct
AVEFTTLADYLHLLQ

SEQ ID NO: 38828 - protein, 15 aa, synthetic construct
TCTTGITDPPPPDGS

SEQ ID NO: 38829 - protein, 15 aa, synthetic construct
TLIIAEAFEDDTGRY

SEQ ID NO: 38830 - protein, 15 aa, synthetic construct
DLDYTPTSASFVNKQ

SEQ ID NO: 38831 - protein, 15 aa, synthetic construct
SSERSDSDQVLPNEN

SEQ ID NO: 38832 - protein, 15 aa, synthetic construct
RNTCTTGITDPPPPD

SEQ ID NO: 38833 - protein, 15 aa, synthetic construct
IQVLPDGRVTNIPQG

SEQ ID NO: 38834 - protein, 15 aa, synthetic construct
LHTLIIAEAFEDDTG

SEQ ID NO: 38835 - protein, 15 aa, synthetic construct
HTLIIAEAFEDDTGR

SEQ ID NO: 38836 - protein, 15 aa, synthetic construct
ELNKQVVSSSEQLQS

SEQ ID NO: 38837 - protein, 15 aa, synthetic construct
TRLHQYIFSHILRLE

SEQ ID NO: 38838 - protein, 15 aa, synthetic construct
EQALLSASQEIEMHA

SEQ ID NO: 38839 - protein, 15 aa, synthetic construct
KSRLMFTMYDLDENG

SEQ ID NO: 38840 - protein, 15 aa, synthetic construct
NTCTTGITDPPPPDG

SEQ ID NO: 38841 - protein, 15 aa, synthetic construct
GYARPWSPAEDSRIR

SEQ ID NO: 38842 - protein, 15 aa, synthetic construct
EELNKQVVSSSEQLQ

SEQ ID NO: 38843 - protein, 15 aa, synthetic construct
EDVASSSSESEMEEE

SEQ ID NO: 38844 - protein, 15 aa, synthetic construct
PHAGYARPWSPAEDS

SEQ ID NO: 38845 - protein, 9 aa, synthetic construct
SLSDFTGPP

SEQ ID NO: 38846 - protein, 8 aa, synthetic construct
DNMLRGTE

SEQ ID NO: 38847 - protein, 10 aa, synthetic construct
HKYFEESFKA

SEQ ID NO: 38848 - protein, 9 aa, synthetic construct
KYFEESFKA

SEQ ID NO: 38849 - protein, 8 aa, synthetic construct
YFEESFKA

SEQ ID NO: 38850 - protein, 15 aa, synthetic construct
VTQLAIDTEERLKGV

SEQ ID NO: 38851 - protein, 15 aa, synthetic construct
HRKVLRDNIQGITKP

SEQ ID NO: 38852 - protein, 15 aa, synthetic construct
TAVFTPYSAAFLLKE

SEQ ID NO: 38853 - protein, 15 aa, synthetic construct
PNKVQEHYNYTKETL

SEQ ID NO: 38854 - protein, 15 aa, synthetic construct
RKVRTRSLSDFTGPP

SEQ ID NO: 38855 - protein, 15 aa, synthetic construct
EYITVGDKYVSQFNR

SEQ ID NO: 38856 - protein, 9 aa, synthetic construct
SLLQSDRVL

SEQ ID NO: 38857 - protein, 8 aa, synthetic construct
LLSPPVKV

SEQ ID NO: 38858 - protein, 11 aa, synthetic construct
ETLLLSPPVKV

SEQ ID NO: 38859 - protein, 10 aa, synthetic construct
LLLSPPVKVK

SEQ ID NO: 38860 - protein, 10 aa, synthetic construct
SLLGWILWYT

SEQ ID NO: 38861 - protein, 9 aa, synthetic construct
RLQNPRYKV

SEQ ID NO: 38862 - protein, 9 aa, synthetic construct
LLLSPPVKV

SEQ ID NO: 38863 - protein, 10 aa, synthetic construct
TLLLSPPVKV

SEQ ID NO: 38864 - protein, 11 aa, synthetic construct
TLLLSPPVKVK

SEQ ID NO: 38865 - protein, 11 aa, synthetic construct
SLLQSDRVLYL

SEQ ID NO: 38866 - protein, 9 aa, synthetic construct
FLSLLGWIL

SEQ ID NO: 38867 - protein, 10 aa, synthetic construct
ILWYTGNIEI

SEQ ID NO: 38868 - protein, 10 aa, synthetic construct
RLFRVASKGR

SEQ ID NO: 38869 - protein, 9 aa, synthetic construct
LLSPPVKVK

SEQ ID NO: 38870 - protein, 9 aa, synthetic construct
MALTSDLGK

SEQ ID NO: 38871 - protein, 10 aa, synthetic construct
SDLGKQIKLK

SEQ ID NO: 38872 - protein, 9 aa, synthetic construct
ATLGNLRGY

SEQ ID NO: 38873 - protein, 9 aa, synthetic construct
DLGKQIKLK

SEQ ID NO: 38874 - protein, 9 aa, synthetic construct
SLLGWILWY

SEQ ID NO: 38875 - protein, 10 aa, synthetic construct
ISRLQNPRYK

SEQ ID NO: 38876 - protein, 11 aa, synthetic construct
ALTSDLGKQIK

SEQ ID NO: 38877 - protein, 9 aa, synthetic construct
LLENYGKFE

SEQ ID NO: 38878 - protein, 11 aa, synthetic construct
SISRLQNPRYK

SEQ ID NO: 38879 - protein, 9 aa, synthetic construct
QVQRILRER

SEQ ID NO: 38880 - protein, 10 aa, synthetic construct
SLLQSDRVLY

SEQ ID NO: 38881 - protein, 9 aa, synthetic construct
SISRLQNPR

SEQ ID NO: 38882 - protein, 11 aa, synthetic construct
VLLENYGKFEK

SEQ ID NO: 38883 - protein, 10 aa, synthetic construct
VLLENYGKFE

SEQ ID NO: 38884 - protein, 10 aa, synthetic construct
LLENYGKFEK

SEQ ID NO: 38885 - protein, 8 aa, synthetic construct
RLQNPRYK

SEQ ID NO: 38886 - protein, 11 aa, synthetic construct
RLFRVASKGRG

SEQ ID NO: 38887 - protein, 9 aa, synthetic construct
SPSSSSSST

SEQ ID NO: 38888 - protein, 9 aa, synthetic construct
VASKGRGGL

SEQ ID NO: 38889 - protein, 9 aa, synthetic construct
SPSSSSPSS

SEQ ID NO: 38890 - protein, 8 aa, synthetic construct
SPSSSSPS

SEQ ID NO: 38891 - protein, 10 aa, synthetic construct
SPRSSSPSSS

SEQ ID NO: 38892 - protein, 10 aa, synthetic construct
SSPSSSSSST

SEQ ID NO: 38893 - protein, 11 aa, synthetic construct
SPRSSSPSSSS

SEQ ID NO: 38894 - protein, 10 aa, synthetic construct
RVASKGRGGL

SEQ ID NO: 38895 - protein, 10 aa, synthetic construct
SSPSPRSSSP

SEQ ID NO: 38896 - protein, 9 aa, synthetic construct
ASKGRGGLL

SEQ ID NO: 38897 - protein, 10 aa, synthetic construct
SPSPRSSSPS

SEQ ID NO: 38898 - protein, 11 aa, synthetic construct
SPSPRSSSPSS

SEQ ID NO: 38899 - protein, 8 aa, synthetic construct
SPRSSSPS

SEQ ID NO: 38900 - protein, 9 aa, synthetic construct
SPRSSSPSS

SEQ ID NO: 38901 - protein, 10 aa, synthetic construct
SASTRHATPL

SEQ ID NO: 38902 - protein, 11 aa, synthetic construct
SPSSSSPSSSG

SEQ ID NO: 38903 - protein, 9 aa, synthetic construct
SPSPRSSSP

SEQ ID NO: 38904 - protein, 10 aa, synthetic construct
SPSSSSPSSS

SEQ ID NO: 38905 - protein, 8 aa, synthetic construct
STRHATPL

SEQ ID NO: 38906 - protein, 9 aa, synthetic construct
ASTRHATPL

SEQ ID NO: 38907 - protein, 11 aa, synthetic construct
SSSPSPRSSSP

SEQ ID NO: 38908 - protein, 9 aa, synthetic construct
STASAPNSP

SEQ ID NO: 38909 - protein, 10 aa, synthetic construct
PSPRSSSPSS

SEQ ID NO: 38910 - protein, 11 aa, synthetic construct
STASAPNSPRT

SEQ ID NO: 38911 - protein, 9 aa, synthetic construct
SSSPSSSSP

SEQ ID NO: 38912 - protein, 10 aa, synthetic construct
IPESETESTA

SEQ ID NO: 38913 - protein, 10 aa, synthetic construct
SSPSSSSPSS

SEQ ID NO: 38914 - protein, 9 aa, synthetic construct
SSGKTPETL

SEQ ID NO: 38915 - protein, 8 aa, synthetic construct
SGKTPETL

SEQ ID NO: 38916 - protein, 9 aa, synthetic construct
GAADWGNNF

SEQ ID NO: 38917 - protein, 8 aa, synthetic construct
LSQVQRIL

SEQ ID NO: 38918 - protein, 9 aa, synthetic construct
NNFQHYPEL

SEQ ID NO: 38919 - protein, 11 aa, synthetic construct
MASLLQSDRVL

SEQ ID NO: 38920 - protein, 9 aa, synthetic construct
LQNPRYKVL

SEQ ID NO: 38921 - protein, 8 aa, synthetic construct
AADWGNNF

SEQ ID NO: 38922 - protein, 9 aa, synthetic construct
VQRILRERF

SEQ ID NO: 38923 - protein, 8 aa, synthetic construct
NFQHYPEL

SEQ ID NO: 38924 - protein, 9 aa, synthetic construct
FEIVDRSQL

SEQ ID NO: 38925 - protein, 9 aa, synthetic construct
FEKGYLIFV

SEQ ID NO: 38926 - protein, 9 aa, synthetic construct
NYGKFEKGY

SEQ ID NO: 38927 - protein, 8 aa, synthetic construct
QRILRERF

SEQ ID NO: 38928 - protein, 9 aa, synthetic construct
RGGLLEVNL

SEQ ID NO: 38929 - protein, 9 aa, synthetic construct
KFEKGYLIF

SEQ ID NO: 38930 - protein, 8 aa, synthetic construct
SRLQNPRY

SEQ ID NO: 38931 - protein, 9 aa, synthetic construct
TRHATPLPV

SEQ ID NO: 38932 - protein, 15 aa, synthetic construct
PRLFRVASKGRGGLL

SEQ ID NO: 38933 - protein, 15 aa, synthetic construct
LVPRLFRVASKGRGG

SEQ ID NO: 38934 - protein, 15 aa, synthetic construct
ELVPRLFRVASKGRG

SEQ ID NO: 38935 - protein, 15 aa, synthetic construct
SQVQRILRERFCRQS

SEQ ID NO: 38936 - protein, 15 aa, synthetic construct
EFEIVDRSQLPGPGD

SEQ ID NO: 38937 - protein, 15 aa, synthetic construct
CLSQVQRILRERFCR

SEQ ID NO: 38938 - protein, 15 aa, synthetic construct
VPRLFRVASKGRGGL

SEQ ID NO: 38939 - protein, 15 aa, synthetic construct
MASLLQSDRVLYLVQ

SEQ ID NO: 38940 - protein, 15 aa, synthetic construct
GEEFEIVDRSQLPGP

SEQ ID NO: 38941 - protein, 15 aa, synthetic construct
EEFEIVDRSQLPGPG

SEQ ID NO: 38942 - protein, 15 aa, synthetic construct
LSQVQRILRERFCRQ

SEQ ID NO: 38943 - protein, 15 aa, synthetic construct
PRYKVLASGGLRIQK

SEQ ID NO: 38944 - protein, 15 aa, synthetic construct
GWILWYTGNIEISRQ

SEQ ID NO: 38945 - protein, 15 aa, synthetic construct
PAETLLLSPPVKVKG

SEQ ID NO: 38946 - protein, 15 aa, synthetic construct
LEPGEEFEIVDRSQL

SEQ ID NO: 38947 - protein, 15 aa, synthetic construct
LGWILWYTGNIEISR

SEQ ID NO: 38948 - protein, 15 aa, synthetic construct
EPGEEFEIVDRSQLP

SEQ ID NO: 38949 - protein, 15 aa, synthetic construct
ASLLQSDRVLYLVQG

SEQ ID NO: 38950 - protein, 15 aa, synthetic construct
KDAISISRLQNPRYK

SEQ ID NO: 38951 - protein, 15 aa, synthetic construct
PGEEFEIVDRSQLPG

SEQ ID NO: 38952 - protein, 15 aa, synthetic construct
AETLLLSPPVKVKGE

SEQ ID NO: 38953 - protein, 15 aa, synthetic construct
LPAETLLLSPPVKVK

SEQ ID NO: 38954 - protein, 15 aa, synthetic construct
NPRYKVLASGGLRIQ

SEQ ID NO: 38955 - protein, 15 aa, synthetic construct
DAISISRLQNPRYKV

SEQ ID NO: 38956 - protein, 15 aa, synthetic construct
AISISRLQNPRYKVL

SEQ ID NO: 38957 - protein, 15 aa, synthetic construct
LQNPRYKVLASGGLR

SEQ ID NO: 38958 - protein, 15 aa, synthetic construct
TATLGNLRGYGMASP

SEQ ID NO: 38959 - protein, 15 aa, synthetic construct
QNPRYKVLASGGLRI

SEQ ID NO: 38960 - protein, 15 aa, synthetic construct
ESDGPRGSEVHTTSA

SEQ ID NO: 38961 - protein, 15 aa, synthetic construct
QSFHYGQPDRQGQSS

SEQ ID NO: 38962 - protein, 15 aa, synthetic construct
SRLQNPRYKVLASGG

SEQ ID NO: 38963 - protein, 15 aa, synthetic construct
QGQSFHYGQPDRQGQ

SEQ ID NO: 38964 - protein, 15 aa, synthetic construct
RLQNPRYKVLASGGL

SEQ ID NO: 38965 - protein, 15 aa, synthetic construct
DGPRGSEVHTTSADA

SEQ ID NO: 38966 - protein, 15 aa, synthetic construct
FESDGPRGSEVHTTS

SEQ ID NO: 38967 - protein, 15 aa, synthetic construct
SDGPRGSEVHTTSAD

SEQ ID NO: 38968 - protein, 15 aa, synthetic construct
GQSFHYGQPDRQGQS

SEQ ID NO: 38969 - protein, 15 aa, synthetic construct
RQGQSFHYGQPDRQG

SEQ ID NO: 38970 - protein, 15 aa, synthetic construct
CGLVNGAADWGNNFQ

SEQ ID NO: 38971 - protein, 15 aa, synthetic construct
GLVNGAADWGNNFQH

SEQ ID NO: 38972 - protein, 15 aa, synthetic construct
SSSSSSTSSPSSSSP

SEQ ID NO: 38973 - protein, 15 aa, synthetic construct
SFHYGQPDRQGQSSH

SEQ ID NO: 38974 - protein, 15 aa, synthetic construct
GPRGSEVHTTSADAP

SEQ ID NO: 38975 - protein, 15 aa, synthetic construct
PRGSEVHTTSADAPK

SEQ ID NO: 38976 - protein, 15 aa, synthetic construct
YKDAISISRLQNPRY

SEQ ID NO: 38977 - protein, 15 aa, synthetic construct
ISRLQNPRYKVLASG

SEQ ID NO: 38978 - protein, 15 aa, synthetic construct
RAHSVVFESDGPRGS

SEQ ID NO: 38979 - protein, 15 aa, synthetic construct
WYKDAISISRLQNPR

SEQ ID NO: 38980 - protein, 15 aa, synthetic construct
PSSSSSSTSSPSSSS

SEQ ID NO: 38981 - protein, 15 aa, synthetic construct
CCGLVNGAADWGNNF

SEQ ID NO: 38982 - protein, 15 aa, synthetic construct
SSSSSSSSSSPSSSS

SEQ ID NO: 38983 - protein, 15 aa, synthetic construct
GQSFHYGQPDRQGQS

SEQ ID NO: 38984 - protein, 9 aa, synthetic construct
YSYNLILKK

SEQ ID NO: 38985 - protein, 9 aa, synthetic construct
KLYKSKTGK

SEQ ID NO: 38986 - protein, 9 aa, synthetic construct
GVQHFDSSK

SEQ ID NO: 38987 - protein, 9 aa, synthetic construct
KASRAQILK

SEQ ID NO: 38988 - protein, 9 aa, synthetic construct
KNYPPRTSR

SEQ ID NO: 38989 - protein, 9 aa, synthetic construct
KWFSTLTHK

SEQ ID NO: 38990 - protein, 9 aa, synthetic construct
KWFSTLTKR

SEQ ID NO: 38991 - protein, 9 aa, synthetic construct
FKWFSTLTK

SEQ ID NO: 38992 - protein, 9 aa, synthetic construct
KTYSFPHTY

SEQ ID NO: 38993 - protein, 9 aa, synthetic construct
RIRDGVVLK

SEQ ID NO: 38994 - protein, 9 aa, synthetic construct
SSYYNLILK

SEQ ID NO: 38995 - protein, 9 aa, synthetic construct
SIYAPLILS

SEQ ID NO: 38996 - protein, 9 aa, synthetic construct
AASRAQILK

SEQ ID NO: 38997 - protein, 9 aa, synthetic construct
SVMASNKFK

SEQ ID NO: 38998 - protein, 9 aa, synthetic construct
AVMSQGLPK

SEQ ID NO: 38999 - protein, 9 aa, synthetic construct
RLIPPPLPK

SEQ ID NO: 39000 - protein, 9 aa, synthetic construct
HLYLAMLER

SEQ ID NO: 39001 - protein, 9 aa, synthetic construct
SIFDFRTTE

SEQ ID NO: 39002 - protein, 9 aa, synthetic construct
VLYKSKTKY

SEQ ID NO: 39003 - protein, 9 aa, synthetic construct
KAFKSTLTR

SEQ ID NO: 39004 - protein, 9 aa, synthetic construct
VVLKREVFK

SEQ ID NO: 39005 - protein, 9 aa, synthetic construct
GLADGKGEK

SEQ ID NO: 39006 - protein, 9 aa, synthetic construct
AFFSTLTRH

SEQ ID NO: 39007 - protein, 9 aa, synthetic construct
SVWGYIKFK

SEQ ID NO: 39008 - protein, 9 aa, synthetic construct
VLNSTSLYY

SEQ ID NO: 39009 - protein, 9 aa, synthetic construct
RTKGGVSYR

SEQ ID NO: 39010 - protein, 9 aa, synthetic construct
GSFDFRTTE

SEQ ID NO: 39011 - protein, 8 aa, synthetic construct
RIPPPLPK

SEQ ID NO: 39012 - protein, 8 aa, synthetic construct
KWFSTLTR

SEQ ID NO: 39013 - protein, 9 aa, synthetic construct
EVLDGSMRK

SEQ ID NO: 39014 - protein, 9 aa, synthetic construct
IIADFLRIR

SEQ ID NO: 39015 - protein, 9 aa, synthetic construct
EFRDSNYLR

SEQ ID NO: 39016 - protein, 9 aa, synthetic construct
RYDIIKTYH

SEQ ID NO: 39017 - protein, 9 aa, synthetic construct
GAFDSNYLR

SEQ ID NO: 39018 - protein, 9 aa, synthetic construct
KWFSTLHKR

SEQ ID NO: 39019 - protein, 9 aa, synthetic construct
EYPTPRTSR

SEQ ID NO: 39020 - protein, 9 aa, synthetic construct
TVCDKIAQR

SEQ ID NO: 39021 - protein, 9 aa, synthetic construct
AFKWFSTTR

SEQ ID NO: 39022 - protein, 8 aa, synthetic construct
QIAAVMSR

SEQ ID NO: 39023 - protein, 9 aa, synthetic construct
PLWGVRSSG

SEQ ID NO: 39024 - protein, 9 aa, synthetic construct
WFSTLTHKR

SEQ ID NO: 39025 - protein, 8 aa, synthetic construct
TKGGVSYR

SEQ ID NO: 39026 - protein, 9 aa, synthetic construct
SIYAPLIAS

SEQ ID NO: 39027 - protein, 9 aa, synthetic construct
YIFKRMLNR

SEQ ID NO: 39028 - protein, 8 aa, synthetic construct
MADVSLHR

SEQ ID NO: 39029 - protein, 9 aa, synthetic construct
PPLPKPASR

SEQ ID NO: 39030 - protein, 9 aa, synthetic construct
ENYDIITYH

SEQ ID NO: 39031 - protein, 9 aa, synthetic construct
DLGTAGSLR

SEQ ID NO: 39032 - protein, 9 aa, synthetic construct
IPLPKPASR

SEQ ID NO: 39033 - protein, 9 aa, synthetic construct
VIADFCFLR

SEQ ID NO: 39034 - protein, 9 aa, synthetic construct
EVADFCFLR

SEQ ID NO: 39035 - protein, 9 aa, synthetic construct
SVSWIKFKR

SEQ ID NO: 39036 - protein, 9 aa, synthetic construct
GSFPHTYIR

SEQ ID NO: 39037 - protein, 9 aa, synthetic construct
KTADKGEKR

SEQ ID NO: 39038 - protein, 9 aa, synthetic construct
KAFKWTLTR

SEQ ID NO: 39039 - protein, 9 aa, synthetic construct
IYAPIAVLS

SEQ ID NO: 39040 - protein, 9 aa, synthetic construct
VSWGIKFKR

SEQ ID NO: 39041 - protein, 9 aa, synthetic construct
EQIAAVMSR

SEQ ID NO: 39042 - protein, 9 aa, synthetic construct
APLIAVLSL

SEQ ID NO: 39043 - protein, 8 aa, synthetic construct
ASAPLTTP

SEQ ID NO: 39044 - protein, 9 aa, synthetic construct
SPLPVPSAL

SEQ ID NO: 39045 - protein, 8 aa, synthetic construct
APQPVQSH

SEQ ID NO: 39046 - protein, 9 aa, synthetic construct
APPPQTASA

SEQ ID NO: 39047 - protein, 9 aa, synthetic construct
RIRDGFVVL

SEQ ID NO: 39048 - protein, 9 aa, synthetic construct
TASAPLTTL

SEQ ID NO: 39049 - protein, 8 aa, synthetic construct
LPRIPPPL

SEQ ID NO: 39050 - protein, 8 aa, synthetic construct
RPGPKGSI

SEQ ID NO: 39051 - protein, 9 aa, synthetic construct
APQPSHPPI

SEQ ID NO: 39052 - protein, 9 aa, synthetic construct
APIPQGFSL

SEQ ID NO: 39053 - protein, 8 aa, synthetic construct
EPNGLILF

SEQ ID NO: 39054 - protein, 9 aa, synthetic construct
SPLGGPVSA

SEQ ID NO: 39055 - protein, 8 aa, synthetic construct
NPLELQSL

SEQ ID NO: 39056 - protein, 9 aa, synthetic construct
PPLQTASAL

SEQ ID NO: 39057 - protein, 9 aa, synthetic construct
APSGHPSAV

SEQ ID NO: 39058 - protein, 9 aa, synthetic construct
APSGPLSAV

SEQ ID NO: 39059 - protein, 9 aa, synthetic construct
APLWVRGSL

SEQ ID NO: 39060 - protein, 8 aa, synthetic construct
PLWVRGSL

SEQ ID NO: 39061 - protein, 9 aa, synthetic construct
ALRLPRPPL

SEQ ID NO: 39062 - protein, 9 aa, synthetic construct
RPRIPPPLP

SEQ ID NO: 39063 - protein, 8 aa, synthetic construct
IPQGFSCL

SEQ ID NO: 39064 - protein, 9 aa, synthetic construct
LPDPVLEPL

SEQ ID NO: 39065 - protein, 9 aa, synthetic construct
YPRTSRTGH

SEQ ID NO: 39066 - protein, 9 aa, synthetic construct
YPGGPKGSI

SEQ ID NO: 39067 - protein, 9 aa, synthetic construct
APAPPVQSH

SEQ ID NO: 39068 - protein, 9 aa, synthetic construct
APAPQPVQP

SEQ ID NO: 39069 - protein, 8 aa, synthetic construct
APAPQPVQ

SEQ ID NO: 39070 - protein, 9 aa, synthetic construct
QPAPAPQPV

SEQ ID NO: 39071 - protein, 9 aa, synthetic construct
GPLWVRGSV

SEQ ID NO: 39072 - protein, 9 aa, synthetic construct
HPLWVRGSL

SEQ ID NO: 39073 - protein, 9 aa, synthetic construct
APLTTPPLE

SEQ ID NO: 39074 - protein, 9 aa, synthetic construct
ASAPLTTPL

SEQ ID NO: 39075 - protein, 9 aa, synthetic construct
SSHGSSSAS

SEQ ID NO: 39076 - protein, 9 aa, synthetic construct
RTTEPGLIL

SEQ ID NO: 39077 - protein, 9 aa, synthetic construct
RPGPKGSIF

SEQ ID NO: 39078 - protein, 9 aa, synthetic construct
QPRFQSAAA

SEQ ID NO: 39079 - protein, 8 aa, synthetic construct
APIPQGFS

SEQ ID NO: 39080 - protein, 9 aa, synthetic construct
IPQGFSSRF

SEQ ID NO: 39081 - protein, 8 aa, synthetic construct
HPLSAVSF

SEQ ID NO: 39082 - protein, 9 aa, synthetic construct
DSMRKVLVW

SEQ ID NO: 39083 - protein, 9 aa, synthetic construct
TTEPGLILF

SEQ ID NO: 39084 - protein, 9 aa, synthetic construct
LGDLIMALW

SEQ ID NO: 39085 - protein, 9 aa, synthetic construct
KGVGDVQHF

SEQ ID NO: 39086 - protein, 9 aa, synthetic construct
YAYGLKTAG

SEQ ID NO: 39087 - protein, 9 aa, synthetic construct
FSCLSRFLW

SEQ ID NO: 39088 - protein, 9 aa, synthetic construct
FSVVGMDSW

SEQ ID NO: 39089 - protein, 9 aa, synthetic construct
LSMRKVLVW

SEQ ID NO: 39090 - protein, 9 aa, synthetic construct
GTVSAELSW

SEQ ID NO: 39091 - protein, 9 aa, synthetic construct
LADEVIFSV

SEQ ID NO: 39092 - protein, 9 aa, synthetic construct
RTTEPLILF

SEQ ID NO: 39093 - protein, 9 aa, synthetic construct
RTTPNGLIL

SEQ ID NO: 39094 - protein, 8 aa, synthetic construct
SMRKVLVW

SEQ ID NO: 39095 - protein, 9 aa, synthetic construct
YSKTGKYSF

SEQ ID NO: 39096 - protein, 9 aa, synthetic construct
RSNYLRLLF

SEQ ID NO: 39097 - protein, 9 aa, synthetic construct
TTEPNGLIF

SEQ ID NO: 39098 - protein, 9 aa, synthetic construct
RALDKATEY

SEQ ID NO: 39099 - protein, 9 aa, synthetic construct
HSEPPHNNM

SEQ ID NO: 39100 - protein, 8 aa, synthetic construct
LSAVSFAY

SEQ ID NO: 39101 - protein, 8 aa, synthetic construct
TAFSIDSL

SEQ ID NO: 39102 - protein, 8 aa, synthetic construct
YSYYNLIL

SEQ ID NO: 39103 - protein, 9 aa, synthetic construct
LADEVITSV

SEQ ID NO: 39104 - protein, 8 aa, synthetic construct
GAFRDSNY

SEQ ID NO: 39105 - protein, 8 aa, synthetic construct
TSLNPLEL

SEQ ID NO: 39106 - protein, 9 aa, synthetic construct
NYDIIKTYY

SEQ ID NO: 39107 - protein, 9 aa, synthetic construct
YYPDPVLEL

SEQ ID NO: 39108 - protein, 9 aa, synthetic construct
FRTPNGLIL

SEQ ID NO: 39109 - protein, 9 aa, synthetic construct
IYKESDYSY

SEQ ID NO: 39110 - protein, 9 aa, synthetic construct
HRTKGGVSY

SEQ ID NO: 39111 - protein, 9 aa, synthetic construct
TKYSFPHTY

SEQ ID NO: 39112 - protein, 9 aa, synthetic construct
KKYSFPHTY

SEQ ID NO: 39113 - protein, 8 aa, synthetic construct
YHYLYLAM

SEQ ID NO: 39114 - protein, 9 aa, synthetic construct
FRDSNYLLL

SEQ ID NO: 39115 - protein, 9 aa, synthetic construct
FRDSNRLLF

SEQ ID NO: 39116 - protein, 8 aa, synthetic construct
RRQIAAVM

SEQ ID NO: 39117 - protein, 9 aa, synthetic construct
RRTKGGVSY

SEQ ID NO: 39118 - protein, 9 aa, synthetic construct
SHPLSAVSF

SEQ ID NO: 39119 - protein, 9 aa, synthetic construct
FKWFSTLTR

SEQ ID NO: 39120 - protein, 9 aa, synthetic construct
LQGEKASRA

SEQ ID NO: 39121 - protein, 9 aa, synthetic construct
VQALLSNSS

SEQ ID NO: 39122 - protein, 9 aa, synthetic construct
VSEMASNKF

SEQ ID NO: 39123 - protein, 9 aa, synthetic construct
VLVWQNLDS

SEQ ID NO: 39124 - protein, 9 aa, synthetic construct
LRTEFHQHQ

SEQ ID NO: 39125 - protein, 9 aa, synthetic construct
IASKDTAPS

SEQ ID NO: 39126 - protein, 9 aa, synthetic construct
IVSSGTLGD

SEQ ID NO: 39127 - protein, 9 aa, synthetic construct
VQHFDSSKI

SEQ ID NO: 39128 - protein, 9 aa, synthetic construct
LELQSLDVG

SEQ ID NO: 39129 - protein, 9 aa, synthetic construct
IAPVFIQDA

SEQ ID NO: 39130 - protein, 9 aa, synthetic construct
FLRIRTKGG

SEQ ID NO: 39131 - protein, 9 aa, synthetic construct
LDLDDDSHE

SEQ ID NO: 39132 - protein, 9 aa, synthetic construct
LQTASAPLT

SEQ ID NO: 39133 - protein, 9 aa, synthetic construct
MKAIVSSGT

SEQ ID NO: 39134 - protein, 9 aa, synthetic construct
YRGEGTQDE

SEQ ID NO: 39135 - protein, 9 aa, synthetic construct
IAAVMSRAQ

SEQ ID NO: 39136 - protein, 9 aa, synthetic construct
LQIAPVFIQ

SEQ ID NO: 39137 - protein, 9 aa, synthetic construct
LNRELTHLS

SEQ ID NO: 39138 - protein, 9 aa, synthetic construct
IVASGNIGS

SEQ ID NO: 39139 - protein, 9 aa, synthetic construct
VQSHPPIIA

SEQ ID NO: 39140 - protein, 9 aa, synthetic construct
YKQTESDYS

SEQ ID NO: 39141 - protein, 9 aa, synthetic construct
YDIIKTYHY

SEQ ID NO: 39142 - protein, 9 aa, synthetic construct
LKREDVFKA

SEQ ID NO: 39143 - protein, 9 aa, synthetic construct
IIVASGNIG

SEQ ID NO: 39144 - protein, 9 aa, synthetic construct
LRTVQALLS

SEQ ID NO: 39145 - protein, 9 aa, synthetic construct
LIGSPPQPS

SEQ ID NO: 39146 - protein, 9 aa, synthetic construct
FQSAASRAQ

SEQ ID NO: 39147 - protein, 9 aa, synthetic construct
LLSVAATPA

SEQ ID NO: 39148 - protein, 9 aa, synthetic construct
LSGLIVPEI

SEQ ID NO: 39149 - protein, 9 aa, synthetic construct
IIASKDTAP

SEQ ID NO: 39150 - protein, 9 aa, synthetic construct
LSPAFSEDS

SEQ ID NO: 39151 - protein, 9 aa, synthetic construct
YRPAEVAET

SEQ ID NO: 39152 - protein, 9 aa, synthetic construct
LSVAATPAA

SEQ ID NO: 39153 - protein, 9 aa, synthetic construct
LVLNSTSFL

SEQ ID NO: 39154 - protein, 9 aa, synthetic construct
LILKKAGQF

SEQ ID NO: 39155 - protein, 9 aa, synthetic construct
GKGEKRASE

SEQ ID NO: 39156 - protein, 9 aa, synthetic construct
ILDKATEYI

SEQ ID NO: 39157 - protein, 9 aa, synthetic construct
LHRNPATLK

SEQ ID NO: 39158 - protein, 9 aa, synthetic construct
FSTLTRHKR

SEQ ID NO: 39159 - protein, 9 aa, synthetic construct
LVRSPKSAG

SEQ ID NO: 39160 - protein, 9 aa, synthetic construct
YNLILKKAG

SEQ ID NO: 39161 - protein, 9 aa, synthetic construct
IIKTYHYLY

SEQ ID NO: 39162 - protein, 9 aa, synthetic construct
ILFSHGKPR

SEQ ID NO: 39163 - protein, 9 aa, synthetic construct
LVVADKMMV

SEQ ID NO: 39164 - protein, 9 aa, synthetic construct
IVPEIRGNE

SEQ ID NO: 39165 - protein, 9 aa, synthetic construct
LIAVLSGLI

SEQ ID NO: 39166 - protein, 9 aa, synthetic construct
FVVLKREDV

SEQ ID NO: 39167 - protein, 9 aa, synthetic construct
VVGSGSWQR

SEQ ID NO: 39168 - protein, 9 aa, synthetic construct
WQRVNAQTA

SEQ ID NO: 39169 - protein, 9 aa, synthetic construct
TGTVSAELS

SEQ ID NO: 39170 - protein, 9 aa, synthetic construct
TSGIIASKD

SEQ ID NO: 39171 - protein, 9 aa, synthetic construct
AQLEEIEET

SEQ ID NO: 39172 - protein, 9 aa, synthetic construct
VSFAYAAGA

SEQ ID NO: 39173 - protein, 9 aa, synthetic construct
LKGSQDSSE

SEQ ID NO: 39174 - protein, 9 aa, synthetic construct
GEGTQDEEE

SEQ ID NO: 39175 - protein, 9 aa, synthetic construct
RRGTKGGVS

SEQ ID NO: 39176 - protein, 9 aa, synthetic construct
VSAVSIEEG

SEQ ID NO: 39177 - protein, 9 aa, synthetic construct
EKASRAQIL

SEQ ID NO: 39178 - protein, 9 aa, synthetic construct
FDALDLDDD

SEQ ID NO: 39179 - protein, 9 aa, synthetic construct
LEEIEETGG

SEQ ID NO: 39180 - protein, 9 aa, synthetic construct
GTGTVSAEL

SEQ ID NO: 39181 - protein, 9 aa, synthetic construct
FDSSKIMEE

SEQ ID NO: 39182 - protein, 9 aa, synthetic construct
SNSSGDALV

SEQ ID NO: 39183 - protein, 9 aa, synthetic construct
NSTSFLYYP

SEQ ID NO: 39184 - protein, 9 aa, synthetic construct
DSGGFDALD

SEQ ID NO: 39185 - protein, 9 aa, synthetic construct
GFDALDLDD

SEQ ID NO: 39186 - protein, 9 aa, synthetic construct
SGGFDALDL

SEQ ID NO: 39187 - protein, 9 aa, synthetic construct
VGMDSDWLM

SEQ ID NO: 39188 - protein, 9 aa, synthetic construct
TGGEGLQEE

SEQ ID NO: 39189 - protein, 9 aa, synthetic construct
AVSIEEGAF

SEQ ID NO: 39190 - protein, 9 aa, synthetic construct
VLSGLIVPE

SEQ ID NO: 39191 - protein, 9 aa, synthetic construct
SHGSSSASS

SEQ ID NO: 39192 - protein, 9 aa, synthetic construct
LQEEGVQLE

SEQ ID NO: 39193 - protein, 9 aa, synthetic construct
LGTGTVSAE

SEQ ID NO: 39194 - protein, 9 aa, synthetic construct
EEAQLEEIE

SEQ ID NO: 39195 - protein, 9 aa, synthetic construct
VNAQTAVRS

SEQ ID NO: 39196 - protein, 9 aa, synthetic construct
FAYAAGAGQ

SEQ ID NO: 39197 - protein, 9 aa, synthetic construct
LGSSTAFSI

SEQ ID NO: 39198 - protein, 9 aa, synthetic construct
PVQSHPPII

SEQ ID NO: 39199 - protein, 9 aa, synthetic construct
IPRDKNNFL

SEQ ID NO: 39200 - protein, 9 aa, synthetic construct
ILNEGKILL

SEQ ID NO: 39201 - protein, 9 aa, synthetic construct
TQSELPTSV

SEQ ID NO: 39202 - protein, 9 aa, synthetic construct
RITPGAFRL

SEQ ID NO: 39203 - protein, 9 aa, synthetic construct
GLGDWFLRV

SEQ ID NO: 39204 - protein, 9 aa, synthetic construct
FMYPSKVHI

SEQ ID NO: 39205 - protein, 9 aa, synthetic construct
YLHDVSDKI

SEQ ID NO: 39206 - protein, 9 aa, synthetic construct
KLLAALEGL

SEQ ID NO: 39207 - protein, 9 aa, synthetic construct
SMFINLPRV

SEQ ID NO: 39208 - protein, 9 aa, synthetic construct
VQLEHLSEL

SEQ ID NO: 39209 - protein, 8 aa, synthetic construct
FLYSKLTV

SEQ ID NO: 39210 - protein, 9 aa, synthetic construct
KLDDDSEKV

SEQ ID NO: 39211 - protein, 9 aa, synthetic construct
NLFKDIYFL

SEQ ID NO: 39212 - protein, 9 aa, synthetic construct
ALDETSSLL

SEQ ID NO: 39213 - protein, 9 aa, synthetic construct
KLAKGTVQM

SEQ ID NO: 39214 - protein, 9 aa, synthetic construct
FLSDSNINL

SEQ ID NO: 39215 - protein, 9 aa, synthetic construct
KLEEGNIRL

SEQ ID NO: 39216 - protein, 9 aa, synthetic construct
TLQPGVRML

SEQ ID NO: 39217 - protein, 9 aa, synthetic construct
ALHDVSIPM

SEQ ID NO: 39218 - protein, 9 aa, synthetic construct
LLLGGSLAL

SEQ ID NO: 39219 - protein, 9 aa, synthetic construct
ALVGSNITV

SEQ ID NO: 39220 - protein, 9 aa, synthetic construct
ALVGSITFA

SEQ ID NO: 39221 - protein, 9 aa, synthetic construct
GLPPPLSQL

SEQ ID NO: 39222 - protein, 9 aa, synthetic construct
YMARTPHAL

SEQ ID NO: 39223 - protein, 9 aa, synthetic construct
GLMGNIIEL

SEQ ID NO: 39224 - protein, 9 aa, synthetic construct
KLDDDSERV

SEQ ID NO: 39225 - protein, 9 aa, synthetic construct
MVYEGNARI

SEQ ID NO: 39226 - protein, 9 aa, synthetic construct
LFSGYKWSR

SEQ ID NO: 39227 - protein, 9 aa, synthetic construct
RIKGEAETR

SEQ ID NO: 39228 - protein, 9 aa, synthetic construct
REKASSSKR

SEQ ID NO: 39229 - protein, 9 aa, synthetic construct
ITPDTKALR

SEQ ID NO: 39230 - protein, 9 aa, synthetic construct
MGLGFTSSR

SEQ ID NO: 39231 - protein, 9 aa, synthetic construct
KIYEEKPYK

SEQ ID NO: 39232 - protein, 9 aa, synthetic construct
KSLTLPHSK

SEQ ID NO: 39233 - protein, 9 aa, synthetic construct
KGKLPGTSR

SEQ ID NO: 39234 - protein, 9 aa, synthetic construct
TFSAKYMAR

SEQ ID NO: 39235 - protein, 8 aa, synthetic construct
SGYNKWSR

SEQ ID NO: 39236 - protein, 9 aa, synthetic construct
KANDAIPIR

SEQ ID NO: 39237 - protein, 9 aa, synthetic construct
SQLDPRLNR

SEQ ID NO: 39238 - protein, 9 aa, synthetic construct
TFANLIFPR

SEQ ID NO: 39239 - protein, 9 aa, synthetic construct
IMNDHNAYR

SEQ ID NO: 39240 - protein, 9 aa, synthetic construct
YSKLTVKSR

SEQ ID NO: 39241 - protein, 9 aa, synthetic construct
YFKGPPYPK

SEQ ID NO: 39242 - protein, 9 aa, synthetic construct
LVAQVVAER

SEQ ID NO: 39243 - protein, 9 aa, synthetic construct
AAPSQLKPR

SEQ ID NO: 39244 - protein, 9 aa, synthetic construct
LLKPDSEQR

SEQ ID NO: 39245 - protein, 9 aa, synthetic construct
AYVPMAVSW

SEQ ID NO: 39246 - protein, 9 aa, synthetic construct
GSKLPGTSR

SEQ ID NO: 39247 - protein, 9 aa, synthetic construct
KTFSAKMAR

SEQ ID NO: 39248 - protein, 9 aa, synthetic construct
ALRSGQIER

SEQ ID NO: 39249 - protein, 9 aa, synthetic construct
FVKDIFLHK

SEQ ID NO: 39250 - protein, 9 aa, synthetic construct
HFHESFLYR

SEQ ID NO: 39251 - protein, 9 aa, synthetic construct
VVHKPSASR

SEQ ID NO: 39252 - protein, 9 aa, synthetic construct
LGFEKGQLR

SEQ ID NO: 39253 - protein, 9 aa, synthetic construct
IHFESFLYR

SEQ ID NO: 39254 - protein, 9 aa, synthetic construct
VSFQPETNR

SEQ ID NO: 39255 - protein, 8 aa, synthetic construct
RITPGAFR

SEQ ID NO: 39256 - protein, 9 aa, synthetic construct
TSREIQTAR

SEQ ID NO: 39257 - protein, 9 aa, synthetic construct
QTGPVPPGR

SEQ ID NO: 39258 - protein, 8 aa, synthetic construct
AVNLIFPR

SEQ ID NO: 39259 - protein, 9 aa, synthetic construct
VHKPSVPSR

SEQ ID NO: 39260 - protein, 9 aa, synthetic construct
YGLDRWFLR

SEQ ID NO: 39261 - protein, 9 aa, synthetic construct
LYSKLTVSR

SEQ ID NO: 39262 - protein, 9 aa, synthetic construct
AVYLIQMAR

SEQ ID NO: 39263 - protein, 9 aa, synthetic construct
KLFSGKWSR

SEQ ID NO: 39264 - protein, 9 aa, synthetic construct
ITFNLIFPR

SEQ ID NO: 39265 - protein, 9 aa, synthetic construct
TMPPPQVSR

SEQ ID NO: 39266 - protein, 9 aa, synthetic construct
AVRSTYQNR

SEQ ID NO: 39267 - protein, 8 aa, synthetic construct
SATPLPRR

SEQ ID NO: 39268 - protein, 9 aa, synthetic construct
LMNDHNAYR

SEQ ID NO: 39269 - protein, 9 aa, synthetic construct
LSRTPGAFR

SEQ ID NO: 39270 - protein, 9 aa, synthetic construct
GRPSTPQRQ

SEQ ID NO: 39271 - protein, 9 aa, synthetic construct
SRQTAVRLL

SEQ ID NO: 39272 - protein, 9 aa, synthetic construct
SRIQTAVRL

SEQ ID NO: 39273 - protein, 9 aa, synthetic construct
GLAFEAAGF

SEQ ID NO: 39274 - protein, 9 aa, synthetic construct
HRIETGKIL

SEQ ID NO: 39275 - protein, 9 aa, synthetic construct
QRYGQLSEK

SEQ ID NO: 39276 - protein, 9 aa, synthetic construct
SWFAGIVAV

SEQ ID NO: 39277 - protein, 9 aa, synthetic construct
RRIEDGDSM

SEQ ID NO: 39278 - protein, 9 aa, synthetic construct
QRLTCQEKL

SEQ ID NO: 39279 - protein, 9 aa, synthetic construct
TRLATGLMR

SEQ ID NO: 39280 - protein, 9 aa, synthetic construct
KRSTITSRI

SEQ ID NO: 39281 - protein, 9 aa, synthetic construct
SRLPLAVHS

SEQ ID NO: 39282 - protein, 9 aa, synthetic construct
MRVKKTMFF

SEQ ID NO: 39283 - protein, 9 aa, synthetic construct
SRLTLPHSK

SEQ ID NO: 39284 - protein, 9 aa, synthetic construct
RRILNETGK

SEQ ID NO: 39285 - protein, 9 aa, synthetic construct
HRYTEEKPY

SEQ ID NO: 39286 - protein, 9 aa, synthetic construct
MRYGQLSEK

SEQ ID NO: 39287 - protein, 9 aa, synthetic construct
KRKKVKMEK

SEQ ID NO: 39288 - protein, 9 aa, synthetic construct
ERLKLFSGY

SEQ ID NO: 39289 - protein, 9 aa, synthetic construct
SRITPGANL

SEQ ID NO: 39290 - protein, 9 aa, synthetic construct
ERVKMILKL

SEQ ID NO: 39291 - protein, 9 aa, synthetic construct
MRTPHWALF

SEQ ID NO: 39292 - protein, 9 aa, synthetic construct
LRHQPQQQL

SEQ ID NO: 39293 - protein, 8 aa, synthetic construct
SRITPGAF

SEQ ID NO: 39294 - protein, 9 aa, synthetic construct
ERKVVMILK

SEQ ID NO: 39295 - protein, 9 aa, synthetic construct
GWFAGIVNS

SEQ ID NO: 39296 - protein, 9 aa, synthetic construct
KRASSSGKR

SEQ ID NO: 39297 - protein, 9 aa, synthetic construct
KRKASSSGK

SEQ ID NO: 39298 - protein, 9 aa, synthetic construct
SWFAGIVSA

SEQ ID NO: 39299 - protein, 9 aa, synthetic construct
GRLPLVHSA

SEQ ID NO: 39300 - protein, 9 aa, synthetic construct
GRLPLAVHQ

SEQ ID NO: 39301 - protein, 9 aa, synthetic construct
RLAGPPVAT

SEQ ID NO: 39302 - protein, 9 aa, synthetic construct
GLGGGLNVL

SEQ ID NO: 39303 - protein, 8 aa, synthetic construct
ARTPHWAL

SEQ ID NO: 39304 - protein, 9 aa, synthetic construct
RKFSGPPAR

SEQ ID NO: 39305 - protein, 8 aa, synthetic construct
RLAGPPAV

SEQ ID NO: 39306 - protein, 9 aa, synthetic construct
LRVEDRLNR

SEQ ID NO: 39307 - protein, 9 aa, synthetic construct
IRFSGPPAR

SEQ ID NO: 39308 - protein, 9 aa, synthetic construct
SRKVVKMIL

SEQ ID NO: 39309 - protein, 9 aa, synthetic construct
IRLAVRLTY

SEQ ID NO: 39310 - protein, 9 aa, synthetic construct
ERKTPSLRL

SEQ ID NO: 39311 - protein, 9 aa, synthetic construct
VRLESTYQR

SEQ ID NO: 39312 - protein, 9 aa, synthetic construct
GLFEAAGFH

SEQ ID NO: 39313 - protein, 8 aa, synthetic construct
KRPSLRLF

SEQ ID NO: 39314 - protein, 9 aa, synthetic construct
YRTPHWALF

SEQ ID NO: 39315 - protein, 9 aa, synthetic construct
TRLATGLGM

SEQ ID NO: 39316 - protein, 9 aa, synthetic construct
KRSEAVPAV

SEQ ID NO: 39317 - protein, 9 aa, synthetic construct
LRITPGAFR

SEQ ID NO: 39318 - protein, 9 aa, synthetic construct
MRVKKPFFL

SEQ ID NO: 39319 - protein, 9 aa, synthetic construct
IENELSRIT

SEQ ID NO: 39320 - protein, 8 aa, synthetic construct
YESHVVEW

SEQ ID NO: 39321 - protein, 9 aa, synthetic construct
QELEHLSEL

SEQ ID NO: 39322 - protein, 9 aa, synthetic construct
VEYDLISQF

SEQ ID NO: 39323 - protein, 9 aa, synthetic construct
KDIHSGLAY

SEQ ID NO: 39324 - protein, 9 aa, synthetic construct
QERLFHGNY

SEQ ID NO: 39325 - protein, 9 aa, synthetic construct
FEYDISQFM

SEQ ID NO: 39326 - protein, 9 aa, synthetic construct
LELPQQQQL

SEQ ID NO: 39327 - protein, 9 aa, synthetic construct
KDMARTPHW

SEQ ID NO: 39328 - protein, 9 aa, synthetic construct
QELPTSFAV

SEQ ID NO: 39329 - protein, 9 aa, synthetic construct
SEILSAPEG

SEQ ID NO: 39330 - protein, 8 aa, synthetic construct
VENYLIQM

SEQ ID NO: 39331 - protein, 8 aa, synthetic construct
NDAIPIRW

SEQ ID NO: 39332 - protein, 9 aa, synthetic construct
TEYEVAQRA

SEQ ID NO: 39333 - protein, 9 aa, synthetic construct
SKLTVDKSW

SEQ ID NO: 39334 - protein, 9 aa, synthetic construct
YEQRPAKAL

SEQ ID NO: 39335 - protein, 9 aa, synthetic construct
IEPKKPPVF

SEQ ID NO: 39336 - protein, 9 aa, synthetic construct
EKDIVGLAY

SEQ ID NO: 39337 - protein, 9 aa, synthetic construct
TESSSGQAA

SEQ ID NO: 39338 - protein, 9 aa, synthetic construct
LEQKNIRLL

SEQ ID NO: 39339 - protein, 9 aa, synthetic construct
LEEGQKIRL

SEQ ID NO: 39340 - protein, 9 aa, synthetic construct
NENDIPIRW

SEQ ID NO: 39341 - protein, 9 aa, synthetic construct
KENNISVAF

SEQ ID NO: 39342 - protein, 9 aa, synthetic construct
NELSRITAF

SEQ ID NO: 39343 - protein, 9 aa, synthetic construct
RDQPGMRVR

SEQ ID NO: 39344 - protein, 9 aa, synthetic construct
SKAYGGLAL

SEQ ID NO: 39345 - protein, 9 aa, synthetic construct
VENYLIQRY

SEQ ID NO: 39346 - protein, 9 aa, synthetic construct
SEISAPEGL

SEQ ID NO: 39347 - protein, 9 aa, synthetic construct
MDHNAYRCF

SEQ ID NO: 39348 - protein, 9 aa, synthetic construct
SEKDIVHSL

SEQ ID NO: 39349 - protein, 9 aa, synthetic construct
AYSKGRMGL

SEQ ID NO: 39350 - protein, 9 aa, synthetic construct
GEVPKPVTF

SEQ ID NO: 39351 - protein, 9 aa, synthetic construct
QEYDLISQF

SEQ ID NO: 39352 - protein, 9 aa, synthetic construct
SDYHPTETF

SEQ ID NO: 39353 - protein, 9 aa, synthetic construct
GDRPESPEY

SEQ ID NO: 39354 - protein, 9 aa, synthetic construct
GEVPVPVTF

SEQ ID NO: 39355 - protein, 9 aa, synthetic construct
SELPTSFAI

SEQ ID NO: 39356 - protein, 9 aa, synthetic construct
RESQSVEEL

SEQ ID NO: 39357 - protein, 8 aa, synthetic construct
EYDLISQF

SEQ ID NO: 39358 - protein, 9 aa, synthetic construct
REDNIRLAV

SEQ ID NO: 39359 - protein, 9 aa, synthetic construct
QDVDLHTHF

SEQ ID NO: 39360 - protein, 9 aa, synthetic construct
SEKDIVHSA

SEQ ID NO: 39361 - protein, 8 aa, synthetic construct
SERKVVKM

SEQ ID NO: 39362 - protein, 9 aa, synthetic construct
QELTQLKAV

SEQ ID NO: 39363 - protein, 8 aa, synthetic construct
LEQPQQQL

SEQ ID NO: 39364 - protein, 9 aa, synthetic construct
RDKEALKEF

SEQ ID NO: 39365 - protein, 9 aa, synthetic construct
GERDTKEAL

SEQ ID NO: 39366 - protein, 9 aa, synthetic construct
SERKVVKML

SEQ ID NO: 39367 - protein, 9 aa, synthetic construct
AEVECQRQL

SEQ ID NO: 39368 - protein, 9 aa, synthetic construct
WDYEHVVEW

SEQ ID NO: 39369 - protein, 9 aa, synthetic construct
IFPDSEQKI

SEQ ID NO: 39370 - protein, 8 aa, synthetic construct
TPGAFRNL

SEQ ID NO: 39371 - protein, 8 aa, synthetic construct
LPTSFAVI

SEQ ID NO: 39372 - protein, 9 aa, synthetic construct
QSPTSFAVI

SEQ ID NO: 39373 - protein, 9 aa, synthetic construct
TMDTTKTVL

SEQ ID NO: 39374 - protein, 9 aa, synthetic construct
GVPLHSATL

SEQ ID NO: 39375 - protein, 8 aa, synthetic construct
ELPTSFAV

SEQ ID NO: 39376 - protein, 9 aa, synthetic construct
LFPDSEQRL

SEQ ID NO: 39377 - protein, 8 aa, synthetic construct
VAAVGSRL

SEQ ID NO: 39378 - protein, 8 aa, synthetic construct
GLPPPYPL

SEQ ID NO: 39379 - protein, 8 aa, synthetic construct
FPDSEQRL

SEQ ID NO: 39380 - protein, 9 aa, synthetic construct
KIPTAHSHV

SEQ ID NO: 39381 - protein, 9 aa, synthetic construct
KIPDSEQRL

SEQ ID NO: 39382 - protein, 9 aa, synthetic construct
KTPDTKALL

SEQ ID NO: 39383 - protein, 9 aa, synthetic construct
GLPPPYSQL

SEQ ID NO: 39384 - protein, 9 aa, synthetic construct
YVPMAVGSF

SEQ ID NO: 39385 - protein, 8 aa, synthetic construct
VVHKPSAV

SEQ ID NO: 39386 - protein, 8 aa, synthetic construct
FSNSSHLI

SEQ ID NO: 39387 - protein, 8 aa, synthetic construct
NLPRVKEL

SEQ ID NO: 39388 - protein, 9 aa, synthetic construct
STPGAFRNL

SEQ ID NO: 39389 - protein, 9 aa, synthetic construct
SLPTSFAVI

SEQ ID NO: 39390 - protein, 9 aa, synthetic construct
TSPPPCNSV

SEQ ID NO: 39391 - protein, 9 aa, synthetic construct
LQPGRVRML

SEQ ID NO: 39392 - protein, 9 aa, synthetic construct
VIPKKPPVF

SEQ ID NO: 39393 - protein, 9 aa, synthetic construct
FLSDSNMNL

SEQ ID NO: 39394 - protein, 9 aa, synthetic construct
GLPTTPAAL

SEQ ID NO: 39395 - protein, 8 aa, synthetic construct
TMPPPQVS

SEQ ID NO: 39396 - protein, 9 aa, synthetic construct
FINPRVKEL

SEQ ID NO: 39397 - protein, 8 aa, synthetic construct
AASEPVVL

SEQ ID NO: 39398 - protein, 9 aa, synthetic construct
TIPDTKALL

SEQ ID NO: 39399 - protein, 9 aa, synthetic construct
RIPGAFRNL

SEQ ID NO: 39400 - protein, 9 aa, synthetic construct
FQPENRANF

SEQ ID NO: 39401 - protein, 9 aa, synthetic construct
ILPRVKELL

SEQ ID NO: 39402 - protein, 8 aa, synthetic construct
VIPVFNLF

SEQ ID NO: 39403 - protein, 9 aa, synthetic construct
LPPPPLSQL

SEQ ID NO: 39404 - protein, 8 aa, synthetic construct
ITPDTKAL

SEQ ID NO: 39405 - protein, 9 aa, synthetic construct
RLEQPQQQL

SEQ ID NO: 39406 - protein, 8 aa, synthetic construct
LDQETSSL

SEQ ID NO: 39407 - protein, 9 aa, synthetic construct
QSEEHLSEL

SEQ ID NO: 39408 - protein, 8 aa, synthetic construct
GMDTTKTV

SEQ ID NO: 39409 - protein, 8 aa, synthetic construct
KGEFPPYP

SEQ ID NO: 39410 - protein, 9 aa, synthetic construct
RSEEAVPAV

SEQ ID NO: 39411 - protein, 9 aa, synthetic construct
YSDYHPETF

SEQ ID NO: 39412 - protein, 8 aa, synthetic construct
YDLISQFM

SEQ ID NO: 39413 - protein, 9 aa, synthetic construct
FPDSEQLKI

SEQ ID NO: 39414 - protein, 9 aa, synthetic construct
QTDTTKTVL

SEQ ID NO: 39415 - protein, 9 aa, synthetic construct
KLDDDSRKV

SEQ ID NO: 39416 - protein, 8 aa, synthetic construct
YSKAYGRM

SEQ ID NO: 39417 - protein, 9 aa, synthetic construct
FYDLISQFM

SEQ ID NO: 39418 - protein, 8 aa, synthetic construct
QSELPTSF

SEQ ID NO: 39419 - protein, 8 aa, synthetic construct
VDLHTIHF

SEQ ID NO: 39420 - protein, 9 aa, synthetic construct
QVDLHTIHF

SEQ ID NO: 39421 - protein, 9 aa, synthetic construct
LSDSNFINL

SEQ ID NO: 39422 - protein, 9 aa, synthetic construct
FLSDSNMFL

SEQ ID NO: 39423 - protein, 8 aa, synthetic construct
FPDSEQRL

SEQ ID NO: 39424 - protein, 9 aa, synthetic construct
ASDIVHSGL

SEQ ID NO: 39425 - protein, 9 aa, synthetic construct
DADAGGVIL

SEQ ID NO: 39426 - protein, 9 aa, synthetic construct
RPDNIRLAV

SEQ ID NO: 39427 - protein, 9 aa, synthetic construct
GVDLHTIHF

SEQ ID NO: 39428 - protein, 9 aa, synthetic construct
LATGDGMRI

SEQ ID NO: 39429 - protein, 8 aa, synthetic construct
MAAWGFCF

SEQ ID NO: 39430 - protein, 9 aa, synthetic construct
PADQETSSL

SEQ ID NO: 39431 - protein, 9 aa, synthetic construct
IVRKKALPD

SEQ ID NO: 39432 - protein, 9 aa, synthetic construct
LSELRREAG

SEQ ID NO: 39433 - protein, 9 aa, synthetic construct
FSYQSTFSV

SEQ ID NO: 39434 - protein, 9 aa, synthetic construct
FNMLRHLEQ

SEQ ID NO: 39435 - protein, 9 aa, synthetic construct
YLIQMARYG

SEQ ID NO: 39436 - protein, 9 aa, synthetic construct
IVIKEPKKP

SEQ ID NO: 39437 - protein, 9 aa, synthetic construct
VYALHDVSD

SEQ ID NO: 39438 - protein, 9 aa, synthetic construct
FMRKRESQS

SEQ ID NO: 39439 - protein, 9 aa, synthetic construct
YQELTQLKA

SEQ ID NO: 39440 - protein, 9 aa, synthetic construct
FLYSKLTVD

SEQ ID NO: 39441 - protein, 9 aa, synthetic construct
IDVDKKLEE

SEQ ID NO: 39442 - protein, 9 aa, synthetic construct
FKEETRLAT

SEQ ID NO: 39443 - protein, 9 aa, synthetic construct
YNKRSTITS

SEQ ID NO: 39444 - protein, 9 aa, synthetic construct
YYKANENDA

SEQ ID NO: 39445 - protein, 9 aa, synthetic construct
FLRVEDRQD

SEQ ID NO: 39446 - protein, 9 aa, synthetic construct
YRCFSQPRH

SEQ ID NO: 39447 - protein, 9 aa, synthetic construct
MVYEGNARD

SEQ ID NO: 39448 - protein, 9 aa, synthetic construct
FAVITEDAT

SEQ ID NO: 39449 - protein, 9 aa, synthetic construct
FTIDVDKKL

SEQ ID NO: 39450 - protein, 9 aa, synthetic construct
YNFNKFGEN

SEQ ID NO: 39451 - protein, 9 aa, synthetic construct
YVPMAVGSW

SEQ ID NO: 39452 - protein, 9 aa, synthetic construct
WKGSGKLPG

SEQ ID NO: 39453 - protein, 9 aa, synthetic construct
IRLAVRLES

SEQ ID NO: 39454 - protein, 9 aa, synthetic construct
LIQMARYGQ

SEQ ID NO: 39455 - protein, 9 aa, synthetic construct
LTVDKSRWQ

SEQ ID NO: 39456 - protein, 9 aa, synthetic construct
FQDRISGAS

SEQ ID NO: 39457 - protein, 9 aa, synthetic construct
FSNSSHLIG

SEQ ID NO: 39458 - protein, 9 aa, synthetic construct
NDKNGKEEV

SEQ ID NO: 39459 - protein, 9 aa, synthetic construct
FINLPRVKE

SEQ ID NO: 39460 - protein, 9 aa, synthetic construct
FNWSSTLTN

SEQ ID NO: 39461 - protein, 9 aa, synthetic construct
LARRDDIED

SEQ ID NO: 39462 - protein, 9 aa, synthetic construct
WFLRVEDRQ

SEQ ID NO: 39463 - protein, 9 aa, synthetic construct
LIGRVEASD

SEQ ID NO: 39464 - protein, 9 aa, synthetic construct
VFVVHKPSA

SEQ ID NO: 39465 - protein, 9 aa, synthetic construct
IRLLRTELQ

SEQ ID NO: 39466 - protein, 9 aa, synthetic construct
MRIENKGRM

SEQ ID NO: 39467 - protein, 9 aa, synthetic construct
YNKWSRPVA

SEQ ID NO: 39468 - protein, 9 aa, synthetic construct
IQTAVRLLL

SEQ ID NO: 39469 - protein, 9 aa, synthetic construct
FEAAGFHLN

SEQ ID NO: 39470 - protein, 9 aa, synthetic construct
VKMILKLLE

SEQ ID NO: 39471 - protein, 9 aa, synthetic construct
FNKFGENKY

SEQ ID NO: 39472 - protein, 9 aa, synthetic construct
MQAKKKELA

SEQ ID NO: 39473 - protein, 9 aa, synthetic construct
FRNLGSLRY

SEQ ID NO: 39474 - protein, 9 aa, synthetic construct
IYFLHKIHT

SEQ ID NO: 39475 - protein, 9 aa, synthetic construct
FAGIVNSAV

SEQ ID NO: 39476 - protein, 9 aa, synthetic construct
YKANENDAI

SEQ ID NO: 39477 - protein, 9 aa, synthetic construct
FFLEGKPKA

SEQ ID NO: 39478 - protein, 9 aa, synthetic construct
IENKRKVLG

SEQ ID NO: 39479 - protein, 9 aa, synthetic construct
LRILEQSGE

SEQ ID NO: 39480 - protein, 9 aa, synthetic construct
YQSTFSVHQ

SEQ ID NO: 39481 - protein, 9 aa, synthetic construct
LIPMNDHNA

SEQ ID NO: 39482 - protein, 9 aa, synthetic construct
VNEIIRKEF

SEQ ID NO: 39483 - protein, 9 aa, synthetic construct
ATPLPRRPQ

SEQ ID NO: 39484 - protein, 9 aa, synthetic construct
LTQLKAAVG

SEQ ID NO: 39485 - protein, 9 aa, synthetic construct
LKIFPDSEQ

SEQ ID NO: 39486 - protein, 9 aa, synthetic construct
NEIIRKEFS

SEQ ID NO: 39487 - protein, 9 aa, synthetic construct
VHSAQHGPG

SEQ ID NO: 39488 - protein, 9 aa, synthetic construct
VKMKREKAS

SEQ ID NO: 39489 - protein, 9 aa, synthetic construct
LAALEGLKG

SEQ ID NO: 39490 - protein, 9 aa, synthetic construct
GEQLRILEQ

SEQ ID NO: 39491 - protein, 9 aa, synthetic construct
LEHLSELRR

SEQ ID NO: 39492 - protein, 9 aa, synthetic construct
LRIEKNELS

SEQ ID NO: 39493 - protein, 9 aa, synthetic construct
ISLTQKIPT

SEQ ID NO: 39494 - protein, 9 aa, synthetic construct
LRHLEQPQQ

SEQ ID NO: 39495 - protein, 9 aa, synthetic construct
LVKENNIRS

SEQ ID NO: 39496 - protein, 9 aa, synthetic construct
LHSATPLPR

SEQ ID NO: 39497 - protein, 9 aa, synthetic construct
FFLYSKLTV

SEQ ID NO: 39498 - protein, 9 aa, synthetic construct
LFNMLRHLE

SEQ ID NO: 39499 - protein, 9 aa, synthetic construct
MACAAQNAS

SEQ ID NO: 39500 - protein, 9 aa, synthetic construct
SYNFNKFGE

SEQ ID NO: 39501 - protein, 9 aa, synthetic construct
VGSWFAGIV

SEQ ID NO: 39502 - protein, 9 aa, synthetic construct
VAEMWRRNG

SEQ ID NO: 39503 - protein, 9 aa, synthetic construct
LIGHGRIHS

SEQ ID NO: 39504 - protein, 9 aa, synthetic construct
VEEALKKLG

SEQ ID NO: 39505 - protein, 9 aa, synthetic construct
LTNHRKIYT

SEQ ID NO: 39506 - protein, 9 aa, synthetic construct
LSIENKRKV

SEQ ID NO: 39507 - protein, 9 aa, synthetic construct
LKINNKNAL

SEQ ID NO: 39508 - protein, 9 aa, synthetic construct
LNELWKNFG

SEQ ID NO: 39509 - protein, 9 aa, synthetic construct
ISGGFGGVA

SEQ ID NO: 39510 - protein, 9 aa, synthetic construct
IEDGDSMIS

SEQ ID NO: 39511 - protein, 9 aa, synthetic construct
ISGASEKDI

SEQ ID NO: 39512 - protein, 9 aa, synthetic construct
WFAGIVNSA

SEQ ID NO: 39513 - protein, 9 aa, synthetic construct
LASGRLPLA

SEQ ID NO: 39514 - protein, 9 aa, synthetic construct
CQSAAPSQL

SEQ ID NO: 39515 - protein, 9 aa, synthetic construct
FYSFALDKT

SEQ ID NO: 39516 - protein, 9 aa, synthetic construct
LAKGTVQTG

SEQ ID NO: 39517 - protein, 9 aa, synthetic construct
MKREKASSS

SEQ ID NO: 39518 - protein, 9 aa, synthetic construct
VEASDADAG

SEQ ID NO: 39519 - protein, 9 aa, synthetic construct
VAHAVAAVG

SEQ ID NO: 39520 - protein, 9 aa, synthetic construct
AGEGEARPS

SEQ ID NO: 39521 - protein, 9 aa, synthetic construct
LQTGPVPPG

SEQ ID NO: 39522 - protein, 9 aa, synthetic construct
IGHGRIHSG

SEQ ID NO: 39523 - protein, 9 aa, synthetic construct
EFSGPPARN

SEQ ID NO: 39524 - protein, 9 aa, synthetic construct
HRSGQIERG

SEQ ID NO: 39525 - protein, 9 aa, synthetic construct
PFTIDVDKK

SEQ ID NO: 39526 - protein, 9 aa, synthetic construct
VTDASSVPT

SEQ ID NO: 39527 - protein, 9 aa, synthetic construct
TSFAVITED

SEQ ID NO: 39528 - protein, 9 aa, synthetic construct
VHSGLAYTM

SEQ ID NO: 39529 - protein, 9 aa, synthetic construct
SSRGQAASS

SEQ ID NO: 39530 - protein, 9 aa, synthetic construct
IEEAVPAVC

SEQ ID NO: 39531 - protein, 9 aa, synthetic construct
IVNSAVQTT

SEQ ID NO: 39532 - protein, 9 aa, synthetic construct
SNASKSNIA

SEQ ID NO: 39533 - protein, 9 aa, synthetic construct
YSFALDKTI

SEQ ID NO: 39534 - protein, 9 aa, synthetic construct
PSTQAVSFQ

SEQ ID NO: 39535 - protein, 9 aa, synthetic construct
QLIGRVEAS

SEQ ID NO: 39536 - protein, 9 aa, synthetic construct
SSGAASEPV

SEQ ID NO: 39537 - protein, 9 aa, synthetic construct
VSGSRSSPP

SEQ ID NO: 39538 - protein, 9 aa, synthetic construct
QRPAKALEG

SEQ ID NO: 39539 - protein, 9 aa, synthetic construct
SQSVEEALK

SEQ ID NO: 39540 - protein, 9 aa, synthetic construct
IGRVEASDA

SEQ ID NO: 39541 - protein, 9 aa, synthetic construct
ARAVIIFAN

SEQ ID NO: 39542 - protein, 9 aa, synthetic construct
YESHVVEWG

SEQ ID NO: 39543 - protein, 9 aa, synthetic construct
NARAVIIFA

SEQ ID NO: 39544 - protein, 9 aa, synthetic construct
FQPETDNRA

SEQ ID NO: 39545 - protein, 9 aa, synthetic construct
VATSAAAAA

SEQ ID NO: 39546 - protein, 9 aa, synthetic construct
VTFDDVAVH

SEQ ID NO: 39547 - protein, 9 aa, synthetic construct
VAQVVAEMW

SEQ ID NO: 39548 - protein, 9 aa, synthetic construct
WGSSGAASE

SEQ ID NO: 39549 - protein, 9 aa, synthetic construct
VITEDATLS

SEQ ID NO: 39550 - protein, 9 aa, synthetic construct
YSGGNIVRV

SEQ ID NO: 39551 - protein, 9 aa, synthetic construct
PKPGEISND

SEQ ID NO: 39552 - protein, 9 aa, synthetic construct
PAVATSAAA

SEQ ID NO: 39553 - protein, 9 aa, synthetic construct
ESQSVEEAL

SEQ ID NO: 39554 - protein, 9 aa, synthetic construct
ADYYKANEN

SEQ ID NO: 39555 - protein, 9 aa, synthetic construct
ITSREIQTA

SEQ ID NO: 39556 - protein, 9 aa, synthetic construct
AVSFQPETD

SEQ ID NO: 39557 - protein, 9 aa, synthetic construct
IYSADYYKA

SEQ ID NO: 39558 - protein, 9 aa, synthetic construct
WELIQEDIL

SEQ ID NO: 39559 - protein, 9 aa, synthetic construct
PTSFAVITE

SEQ ID NO: 39560 - protein, 9 aa, synthetic construct
LHTIHFHAE

SEQ ID NO: 39561 - protein, 9 aa, synthetic construct
VSGTEYEVA

SEQ ID NO: 39562 - protein, 9 aa, synthetic construct
QSAAPSQLD

SEQ ID NO: 39563 - protein, 9 aa, synthetic construct
AVIIFANED

SEQ ID NO: 39564 - protein, 9 aa, synthetic construct
PVTFDDVAV

SEQ ID NO: 39565 - protein, 9 aa, synthetic construct
YEEISAGDE

SEQ ID NO: 39566 - protein, 9 aa, synthetic construct
IIFANEDDI

SEQ ID NO: 39567 - protein, 9 aa, synthetic construct
TQAVSFQPE

SEQ ID NO: 39568 - protein, 9 aa, synthetic construct
FDDVAVHFS

SEQ ID NO: 39569 - protein, 9 aa, synthetic construct
LKGSSEAPG

SEQ ID NO: 39570 - protein, 9 aa, synthetic construct
YSKAYGRMG

SEQ ID NO: 39571 - protein, 9 aa, synthetic construct
EKASSSGKR

SEQ ID NO: 39572 - protein, 9 aa, synthetic construct
WALFGASER

SEQ ID NO: 39573 - protein, 9 aa, synthetic construct
EVAQRPAKA

SEQ ID NO: 39574 - protein, 9 aa, synthetic construct
ASSHEQARS

SEQ ID NO: 39575 - protein, 9 aa, synthetic construct
YSKLTVDKS

SEQ ID NO: 39576 - protein, 9 aa, synthetic construct
VHGLGVPLH

SEQ ID NO: 39577 - protein, 9 aa, synthetic construct
WFKEETRLA

SEQ ID NO: 39578 - protein, 9 aa, synthetic construct
WYRCYAYDS

SEQ ID NO: 39579 - protein, 9 aa, synthetic construct
YFLHKIHTN

SEQ ID NO: 39580 - protein, 9 aa, synthetic construct
RPDPAHVLL

SEQ ID NO: 39581 - protein, 9 aa, synthetic construct
AVVEDVHLL

SEQ ID NO: 39582 - protein, 9 aa, synthetic construct
AVVEDVWHL

SEQ ID NO: 39583 - protein, 9 aa, synthetic construct
GMLAFLSEV

SEQ ID NO: 39584 - protein, 9 aa, synthetic construct
AQFPESSEL

SEQ ID NO: 39585 - protein, 9 aa, synthetic construct
FLDYVTIHM

SEQ ID NO: 39586 - protein, 9 aa, synthetic construct
GLDDYVFVT

SEQ ID NO: 39587 - protein, 9 aa, synthetic construct
FLSNPAVTT

SEQ ID NO: 39588 - protein, 9 aa, synthetic construct
ALYMEGLNV

SEQ ID NO: 39589 - protein, 9 aa, synthetic construct
FMDPATINM

SEQ ID NO: 39590 - protein, 9 aa, synthetic construct
VLFDYVMFT

SEQ ID NO: 39591 - protein, 9 aa, synthetic construct
FMYNRPIHI

SEQ ID NO: 39592 - protein, 9 aa, synthetic construct
KAPQPSALL

SEQ ID NO: 39593 - protein, 9 aa, synthetic construct
SKVPYIVRV

SEQ ID NO: 39594 - protein, 9 aa, synthetic construct
ALSRPGASR

SEQ ID NO: 39595 - protein, 9 aa, synthetic construct
RLATGMRRK

SEQ ID NO: 39596 - protein, 9 aa, synthetic construct
RALPPGASR

SEQ ID NO: 39597 - protein, 9 aa, synthetic construct
GTVQTGMTK

SEQ ID NO: 39598 - protein, 9 aa, synthetic construct
TMKMGSLKK

SEQ ID NO: 39599 - protein, 8 aa, synthetic construct
ALATGMRR

SEQ ID NO: 39600 - protein, 9 aa, synthetic construct
TVQTGMTTK

SEQ ID NO: 39601 - protein, 9 aa, synthetic construct
VTFSPHIRR

SEQ ID NO: 39602 - protein, 9 aa, synthetic construct
RSIGPWTLH

SEQ ID NO: 39603 - protein, 9 aa, synthetic construct
KSSILTTHK

SEQ ID NO: 39604 - protein, 9 aa, synthetic construct
GTMGHGLQK

SEQ ID NO: 39605 - protein, 9 aa, synthetic construct
GLIQRVVRN

SEQ ID NO: 39606 - protein, 9 aa, synthetic construct
GLIQRVVNK

SEQ ID NO: 39607 - protein, 9 aa, synthetic construct
ALATGMRHK

SEQ ID NO: 39608 - protein, 9 aa, synthetic construct
RQGGKARAK

SEQ ID NO: 39609 - protein, 9 aa, synthetic construct
KTEPGLSSY

SEQ ID NO: 39610 - protein, 9 aa, synthetic construct
SALATGMRR

SEQ ID NO: 39611 - protein, 9 aa, synthetic construct
SSAPRCLSK

SEQ ID NO: 39612 - protein, 9 aa, synthetic construct
TMGHGLPQK

SEQ ID NO: 39613 - protein, 9 aa, synthetic construct
QTPSALLQK

SEQ ID NO: 39614 - protein, 9 aa, synthetic construct
FLELNRTSL

SEQ ID NO: 39615 - protein, 9 aa, synthetic construct
KPQETYADI

SEQ ID NO: 39616 - protein, 9 aa, synthetic construct
TPITSEVSM

SEQ ID NO: 39617 - protein, 8 aa, synthetic construct
TPITSEVS

SEQ ID NO: 39618 - protein, 9 aa, synthetic construct
APPPAGPSL

SEQ ID NO: 39619 - protein, 8 aa, synthetic construct
RPRRRRST

SEQ ID NO: 39620 - protein, 9 aa, synthetic construct
RPRRSTESW

SEQ ID NO: 39621 - protein, 9 aa, synthetic construct
RPRRRSTES

SEQ ID NO: 39622 - protein, 9 aa, synthetic construct
SPGPPGPGP

SEQ ID NO: 39623 - protein, 9 aa, synthetic construct
VPTEGTRGL

SEQ ID NO: 39624 - protein, 8 aa, synthetic construct
FLELNRNF

SEQ ID NO: 39625 - protein, 9 aa, synthetic construct
RPNRVPPTT

SEQ ID NO: 39626 - protein, 9 aa, synthetic construct
IPRSATSTL

SEQ ID NO: 39627 - protein, 9 aa, synthetic construct
RPGASRSGL

SEQ ID NO: 39628 - protein, 9 aa, synthetic construct
SPPPPGPSL

SEQ ID NO: 39629 - protein, 8 aa, synthetic construct
HLRPRDTT

SEQ ID NO: 39630 - protein, 9 aa, synthetic construct
KPQTPSALL

SEQ ID NO: 39631 - protein, 9 aa, synthetic construct
YSSSVSQTF

SEQ ID NO: 39632 - protein, 9 aa, synthetic construct
VRSGSGHLL

SEQ ID NO: 39633 - protein, 9 aa, synthetic construct
IRIGVPWTL

SEQ ID NO: 39634 - protein, 9 aa, synthetic construct
RRSKVPYIV

SEQ ID NO: 39635 - protein, 8 aa, synthetic construct
IRSIGVPW

SEQ ID NO: 39636 - protein, 9 aa, synthetic construct
VRSGSGHQL

SEQ ID NO: 39637 - protein, 9 aa, synthetic construct
IQFNPAVTF

SEQ ID NO: 39638 - protein, 9 aa, synthetic construct
GHSSVSQTF

SEQ ID NO: 39639 - protein, 9 aa, synthetic construct
RRKHSGMIL

SEQ ID NO: 39640 - protein, 9 aa, synthetic construct
ERDPPKRIY

SEQ ID NO: 39641 - protein, 9 aa, synthetic construct
HGLGSQPYY

SEQ ID NO: 39642 - protein, 9 aa, synthetic construct
RSEDPPIYF

SEQ ID NO: 39643 - protein, 9 aa, synthetic construct
RSDPPKRIY

SEQ ID NO: 39644 - protein, 9 aa, synthetic construct
FMDPATNMY

SEQ ID NO: 39645 - protein, 9 aa, synthetic construct
LAKGTVQTM

SEQ ID NO: 39646 - protein, 9 aa, synthetic construct
GSSSVSQTF

SEQ ID NO: 39647 - protein, 9 aa, synthetic construct
SVFELNRNF

SEQ ID NO: 39648 - protein, 8 aa, synthetic construct
LQFHGTKY

SEQ ID NO: 39649 - protein, 9 aa, synthetic construct
AAAGVPWTL

SEQ ID NO: 39650 - protein, 8 aa, synthetic construct
WHSVFLEL

SEQ ID NO: 39651 - protein, 9 aa, synthetic construct
QFLSNPVTF

SEQ ID NO: 39652 - protein, 8 aa, synthetic construct
LSNPAVTF

SEQ ID NO: 39653 - protein, 9 aa, synthetic construct
HYNPATGIF

SEQ ID NO: 39654 - protein, 9 aa, synthetic construct
SYNPATGIF

SEQ ID NO: 39655 - protein, 9 aa, synthetic construct
SFLELNRNF

SEQ ID NO: 39656 - protein, 8 aa, synthetic construct
MGMLRAFL

SEQ ID NO: 39657 - protein, 8 aa, synthetic construct
FYRDGSAL

SEQ ID NO: 39658 - protein, 9 aa, synthetic construct
MRRKHKISG

SEQ ID NO: 39659 - protein, 9 aa, synthetic construct
FKCSSILTT

SEQ ID NO: 39660 - protein, 9 aa, synthetic construct
FINMYNRPI

SEQ ID NO: 39661 - protein, 9 aa, synthetic construct
YLARRRIRL

SEQ ID NO: 39662 - protein, 9 aa, synthetic construct
VTIDIRSIG

SEQ ID NO: 39663 - protein, 9 aa, synthetic construct
LVLKAPLDR

SEQ ID NO: 39664 - protein, 9 aa, synthetic construct
MGMLRAFLS

SEQ ID NO: 39665 - protein, 9 aa, synthetic construct
LEAMARDPP

SEQ ID NO: 39666 - protein, 9 aa, synthetic construct
LNSLQKEPD

SEQ ID NO: 39667 - protein, 9 aa, synthetic construct
YVMFTIHMG

SEQ ID NO: 39668 - protein, 9 aa, synthetic construct
VVRENKEGC

SEQ ID NO: 39669 - protein, 9 aa, synthetic construct
LSSHYGHSS

SEQ ID NO: 39670 - protein, 9 aa, synthetic construct
IAVVTKRER

SEQ ID NO: 39671 - protein, 9 aa, synthetic construct
LVYSAKRKA

SEQ ID NO: 39672 - protein, 9 aa, synthetic construct
AVVTKRERS

SEQ ID NO: 39673 - protein, 9 aa, synthetic construct
LMAAHITAN

SEQ ID NO: 39674 - protein, 9 aa, synthetic construct
VMKVEKAPQ

SEQ ID NO: 39675 - protein, 9 aa, synthetic construct
IQRVVRENK

SEQ ID NO: 39676 - protein, 9 aa, synthetic construct
LICSPTHGG

SEQ ID NO: 39677 - protein, 9 aa, synthetic construct
LTTHKRIHT

SEQ ID NO: 39678 - protein, 9 aa, synthetic construct
IRRLSGIRA

SEQ ID NO: 39679 - protein, 9 aa, synthetic construct
LGLIQRVVR

SEQ ID NO: 39680 - protein, 9 aa, synthetic construct
YSAKRKASM

SEQ ID NO: 39681 - protein, 9 aa, synthetic construct
YAAIDPSMV

SEQ ID NO: 39682 - protein, 9 aa, synthetic construct
FIQFLSNPA

SEQ ID NO: 39683 - protein, 9 aa, synthetic construct
LVTFKSPHI

SEQ ID NO: 39684 - protein, 9 aa, synthetic construct
LRAFLSEVQ

SEQ ID NO: 39685 - protein, 9 aa, synthetic construct
VRGYLARRR

SEQ ID NO: 39686 - protein, 9 aa, synthetic construct
NRNFTSLSL

SEQ ID NO: 39687 - protein, 9 aa, synthetic construct
KVPYIVRQC

SEQ ID NO: 39688 - protein, 9 aa, synthetic construct
VTFYRDGSA

SEQ ID NO: 39689 - protein, 9 aa, synthetic construct
LLQFHGTKY

SEQ ID NO: 39690 - protein, 9 aa, synthetic construct
ILVYSAKRK

SEQ ID NO: 39691 - protein, 9 aa, synthetic construct
LQLAAAVGV

SEQ ID NO: 39692 - protein, 9 aa, synthetic construct
IKTEPGLSS

SEQ ID NO: 39693 - protein, 9 aa, synthetic construct
AAKLMAAHI

SEQ ID NO: 39694 - protein, 9 aa, synthetic construct
LFREKDYKQ

SEQ ID NO: 39695 - protein, 9 aa, synthetic construct
IGGLDNQIQ

SEQ ID NO: 39696 - protein, 9 aa, synthetic construct
FHGTKYAAI

SEQ ID NO: 39697 - protein, 9 aa, synthetic construct
WHSVFLELN

SEQ ID NO: 39698 - protein, 9 aa, synthetic construct
QETYADIGG

SEQ ID NO: 39699 - protein, 9 aa, synthetic construct
VTFGTAIAA

SEQ ID NO: 39700 - protein, 9 aa, synthetic construct
IFTGHTAVV

SEQ ID NO: 39701 - protein, 9 aa, synthetic construct
GTGAQPLWG

SEQ ID NO: 39702 - protein, 9 aa, synthetic construct
MARDPPNRV

SEQ ID NO: 39703 - protein, 9 aa, synthetic construct
EAMARDPPN

SEQ ID NO: 39704 - protein, 9 aa, synthetic construct
DIGGLDNQI

SEQ ID NO: 39705 - protein, 9 aa, synthetic construct
FYRDGSALG

SEQ ID NO: 39706 - protein, 9 aa, synthetic construct
FTSAEDDED

SEQ ID NO: 39707 - protein, 9 aa, synthetic construct
TSGEDAERS

SEQ ID NO: 39708 - protein, 9 aa, synthetic construct
VDSAGSYIS

SEQ ID NO: 39709 - protein, 9 aa, synthetic construct
GHTAVVEDV

SEQ ID NO: 39710 - protein, 9 aa, synthetic construct
DTGASPPPP

SEQ ID NO: 39711 - protein, 9 aa, synthetic construct
TKYAAIDPS

SEQ ID NO: 39712 - protein, 9 aa, synthetic construct
HSSSVSQTF

SEQ ID NO: 39713 - protein, 9 aa, synthetic construct
ITANTNPFS

SEQ ID NO: 39714 - protein, 9 aa, synthetic construct
LWGVRSGSG

SEQ ID NO: 39715 - protein, 9 aa, synthetic construct
AASPEAEQF

SEQ ID NO: 39716 - protein, 9 aa, synthetic construct
SRSGGLEES

SEQ ID NO: 39717 - protein, 9 aa, synthetic construct
RAKAKTRSS

SEQ ID NO: 39718 - protein, 9 aa, synthetic construct
HEAAKLMAA

SEQ ID NO: 39719 - protein, 9 aa, synthetic construct
SDEAKAPQT

SEQ ID NO: 39720 - protein, 9 aa, synthetic construct
NRPIHITLD

SEQ ID NO: 39721 - protein, 9 aa, synthetic construct
LERKKLRYS

SEQ ID NO: 39722 - protein, 9 aa, synthetic construct
FTGHTAVVE

SEQ ID NO: 39723 - protein, 9 aa, synthetic construct
LTQVTFYRD

SEQ ID NO: 39724 - protein, 9 aa, synthetic construct
QTPSALLGQ

SEQ ID NO: 39725 - protein, 9 aa, synthetic construct
ETPLQLAAA

SEQ ID NO: 39726 - protein, 9 aa, synthetic construct
LSGTLSFTS

SEQ ID NO: 39727 - protein, 9 aa, synthetic construct
LSFTSAEDD

SEQ ID NO: 39728 - protein, 9 aa, synthetic construct
PEGGGGAGA

SEQ ID NO: 39729 - protein, 9 aa, synthetic construct
MKMGSLERK

SEQ ID NO: 39730 - protein, 9 aa, synthetic construct
PRSATSYTL

SEQ ID NO: 39731 - protein, 9 aa, synthetic construct
QAGVRGYLA

SEQ ID NO: 39732 - protein, 9 aa, synthetic construct
VEVDSAGSY

SEQ ID NO: 39733 - protein, 9 aa, synthetic construct
SNPAVTFGT

SEQ ID NO: 39734 - protein, 9 aa, synthetic construct
YRDGSALGP

SEQ ID NO: 39735 - protein, 9 aa, synthetic construct
VITIQAGVR

SEQ ID NO: 39736 - protein, 9 aa, synthetic construct
PESSELEDD

SEQ ID NO: 39737 - protein, 9 aa, synthetic construct
LYNGHSGYN

SEQ ID NO: 39738 - protein, 9 aa, synthetic construct
LQFHGTKYA

SEQ ID NO: 39739 - protein, 9 aa, synthetic construct
RERSKVPYI

SEQ ID NO: 39740 - protein, 9 aa, synthetic construct
VTPVEVDSA

SEQ ID NO: 39741 - protein, 9 aa, synthetic construct
AAHITANTN

SEQ ID NO: 39742 - protein, 9 aa, synthetic construct
LCWARALPS

SEQ ID NO: 39743 - protein, 9 aa, synthetic construct
SLTSALHYV

SEQ ID NO: 39744 - protein, 9 aa, synthetic construct
TLMDHWVEA

SEQ ID NO: 39745 - protein, 9 aa, synthetic construct
ALTSALHYL

SEQ ID NO: 39746 - protein, 9 aa, synthetic construct
HLTSALHYL

SEQ ID NO: 39747 - protein, 9 aa, synthetic construct
GTDEPRITV

SEQ ID NO: 39748 - protein, 9 aa, synthetic construct
ELIKNTQTF

SEQ ID NO: 39749 - protein, 9 aa, synthetic construct
CVIEHTNAF

SEQ ID NO: 39750 - protein, 9 aa, synthetic construct
VEIEVIGGY

SEQ ID NO: 39751 - protein, 9 aa, synthetic construct
NVSSVYLYY

SEQ ID NO: 39752 - protein, 9 aa, synthetic construct
TVIEVIGGY

SEQ ID NO: 39753 - protein, 9 aa, synthetic construct
QTTKHSGLY

SEQ ID NO: 39754 - protein, 9 aa, synthetic construct
DILPNVSSV

SEQ ID NO: 39755 - protein, 9 aa, synthetic construct
DILPVSSVY

SEQ ID NO: 39756 - protein, 9 aa, synthetic construct
VVYFTALFY

SEQ ID NO: 39757 - protein, 8 aa, synthetic construct
VVYFTALF

SEQ ID NO: 39758 - protein, 8 aa, synthetic construct
TTKHSGLY

SEQ ID NO: 39759 - protein, 9 aa, synthetic construct
YAHSLTSAY

SEQ ID NO: 39760 - protein, 9 aa, synthetic construct
DIQGEEGAY

SEQ ID NO: 39761 - protein, 9 aa, synthetic construct
SNSGDYILY

SEQ ID NO: 39762 - protein, 9 aa, synthetic construct
ILPNVSSVY

SEQ ID NO: 39763 - protein, 8 aa, synthetic construct
MANRGPAY

SEQ ID NO: 39764 - protein, 8 aa, synthetic construct
SLTSALHY

SEQ ID NO: 39765 - protein, 9 aa, synthetic construct
KIHTGEKPY

SEQ ID NO: 39766 - protein, 9 aa, synthetic construct
FLWQPKREF

SEQ ID NO: 39767 - protein, 9 aa, synthetic construct
GIKSSGVVY

SEQ ID NO: 39768 - protein, 9 aa, synthetic construct
GIKSSGVYF

SEQ ID NO: 39769 - protein, 9 aa, synthetic construct
QITKHSGLY

SEQ ID NO: 39770 - protein, 9 aa, synthetic construct
IMANRGPAY

SEQ ID NO: 39771 - protein, 9 aa, synthetic construct
AERDGNVAF

SEQ ID NO: 39772 - protein, 9 aa, synthetic construct
LIKNTQTTF

SEQ ID NO: 39773 - protein, 9 aa, synthetic construct
VEHTNPAFF

SEQ ID NO: 39774 - protein, 9 aa, synthetic construct
EEEGSKLKI

SEQ ID NO: 39775 - protein, 9 aa, synthetic construct
LEKSVTQRW

SEQ ID NO: 39776 - protein, 9 aa, synthetic construct
HEAESKLKI

SEQ ID NO: 39777 - protein, 9 aa, synthetic construct
VEAEEGSKL

SEQ ID NO: 39778 - protein, 9 aa, synthetic construct
TEIEVIGGY

SEQ ID NO: 39779 - protein, 9 aa, synthetic construct
AEEGSKLKL

SEQ ID NO: 39780 - protein, 9 aa, synthetic construct
SEYGPVFTI

SEQ ID NO: 39781 - protein, 9 aa, synthetic construct
SVVYFTALF

SEQ ID NO: 39782 - protein, 8 aa, synthetic construct
IEAEPEAL

SEQ ID NO: 39783 - protein, 9 aa, synthetic construct
GKVVFTALF

SEQ ID NO: 39784 - protein, 9 aa, synthetic construct
HEIEIGGYL

SEQ ID NO: 39785 - protein, 9 aa, synthetic construct
EEWEALCAY

SEQ ID NO: 39786 - protein, 8 aa, synthetic construct
SERYGPVF

SEQ ID NO: 39787 - protein, 9 aa, synthetic construct
KYFTALFPY

SEQ ID NO: 39788 - protein, 8 aa, synthetic construct
GTDEPRDI

SEQ ID NO: 39789 - protein, 9 aa, synthetic construct
KGDDSVQVV

SEQ ID NO: 39790 - protein, 9 aa, synthetic construct
GTDEPITVL

SEQ ID NO: 39791 - protein, 8 aa, synthetic construct
LSKDHYML

SEQ ID NO: 39792 - protein, 8 aa, synthetic construct
VSSVYLYY

SEQ ID NO: 39793 - protein, 8 aa, synthetic construct
FTFVYTLM

SEQ ID NO: 39794 - protein, 8 aa, synthetic construct
RASSVHDI

SEQ ID NO: 39795 - protein, 9 aa, synthetic construct
LVLLDTAQA

SEQ ID NO: 39796 - protein, 9 aa, synthetic construct
FRSASVLQK

SEQ ID NO: 39797 - protein, 9 aa, synthetic construct
LHYLVPVRP

SEQ ID NO: 39798 - protein, 9 aa, synthetic construct
FDGIQNNDL

SEQ ID NO: 39799 - protein, 9 aa, synthetic construct
IEVIGGYLA

SEQ ID NO: 39800 - protein, 9 aa, synthetic construct
LLAEGAGLG

SEQ ID NO: 39801 - protein, 9 aa, synthetic construct
LKILGPFSN

SEQ ID NO: 39802 - protein, 9 aa, synthetic construct
FQNPYAHSL

SEQ ID NO: 39803 - protein, 9 aa, synthetic construct
WEALCAYQA

SEQ ID NO: 39804 - protein, 9 aa, synthetic construct
LWQLFGPFG

SEQ ID NO: 39805 - protein, 9 aa, synthetic construct
LDTAQAAAA

SEQ ID NO: 39806 - protein, 9 aa, synthetic construct
YSAGEASEV

SEQ ID NO: 39807 - protein, 9 aa, synthetic construct
ITVLRNRQV

SEQ ID NO: 39808 - protein, 9 aa, synthetic construct
FTISQSVLV

SEQ ID NO: 39809 - protein, 9 aa, synthetic construct
FTALFPYVV

SEQ ID NO: 39810 - protein, 9 aa, synthetic construct
LRSYSAGEA

SEQ ID NO: 39811 - protein, 9 aa, synthetic construct
VECTGARIV

SEQ ID NO: 39812 - protein, 9 aa, synthetic construct
VHDIEGFGV

SEQ ID NO: 39813 - protein, 9 aa, synthetic construct
WQLFGPFGA

SEQ ID NO: 39814 - protein, 9 aa, synthetic construct
LQKHIRTHT

SEQ ID NO: 39815 - protein, 9 aa, synthetic construct
LKNKNRLEK

SEQ ID NO: 39816 - protein, 9 aa, synthetic construct
FGVHPKNIF

SEQ ID NO: 39817 - protein, 9 aa, synthetic construct
LRFVKRHCK

SEQ ID NO: 39818 - protein, 9 aa, synthetic construct
ITTKHSGLY

SEQ ID NO: 39819 - protein, 9 aa, synthetic construct
IHLGPRRVV

SEQ ID NO: 39820 - protein, 9 aa, synthetic construct
FILSSTLSK

SEQ ID NO: 39821 - protein, 9 aa, synthetic construct
IRDFTTNKC

SEQ ID NO: 39822 - protein, 9 aa, synthetic construct
IGMANRGPA

SEQ ID NO: 39823 - protein, 9 aa, synthetic construct
IEGFGVHPK

SEQ ID NO: 39824 - protein, 9 aa, synthetic construct
LIVKVSDGK

SEQ ID NO: 39825 - protein, 9 aa, synthetic construct
YMLIVKVSD

SEQ ID NO: 39826 - protein, 9 aa, synthetic construct
VKVIRDFTT

SEQ ID NO: 39827 - protein, 9 aa, synthetic construct
FTIHLGPRR

SEQ ID NO: 39828 - protein, 9 aa, synthetic construct
VYLYYDPDY

SEQ ID NO: 39829 - protein, 9 aa, synthetic construct
LYYDPDYSF

SEQ ID NO: 39830 - protein, 9 aa, synthetic construct
FHFSMDSLL

SEQ ID NO: 39831 - protein, 9 aa, synthetic construct
VQGAEDQGI

SEQ ID NO: 39832 - protein, 9 aa, synthetic construct
NVAFMSYFL

SEQ ID NO: 39833 - protein, 9 aa, synthetic construct
VSSVYLYYD

SEQ ID NO: 39834 - protein, 9 aa, synthetic construct
ILYWDVAGG

SEQ ID NO: 39835 - protein, 9 aa, synthetic construct
LQVEEDPVD

SEQ ID NO: 39836 - protein, 9 aa, synthetic construct
VYTLMDHWV

SEQ ID NO: 39837 - protein, 9 aa, synthetic construct
NNLSKDHYM

SEQ ID NO: 39838 - protein, 9 aa, synthetic construct
HYMLIVKVS

SEQ ID NO: 39839 - protein, 9 aa, synthetic construct
QTYTFTISQ

SEQ ID NO: 39840 - protein, 9 aa, synthetic construct
SSNLQVEED

SEQ ID NO: 39841 - protein, 9 aa, synthetic construct
LEHSEPIEA

SEQ ID NO: 39842 - protein, 9 aa, synthetic construct
HFSMDSLLA

SEQ ID NO: 39843 - protein, 9 aa, synthetic construct
IAGTDEPRD

SEQ ID NO: 39844 - protein, 9 aa, synthetic construct
NLQVEEDPV

SEQ ID NO: 39845 - protein, 9 aa, synthetic construct
ASSVHDIEG

SEQ ID NO: 39846 - protein, 9 aa, synthetic construct
DQGIQGEEG

SEQ ID NO: 39847 - protein, 9 aa, synthetic construct
QKHIRTHTG

SEQ ID NO: 39848 - protein, 9 aa, synthetic construct
NNSYSLHKG

SEQ ID NO: 39849 - protein, 9 aa, synthetic construct
MLIVKVSDG

SEQ ID NO: 39850 - protein, 9 aa, synthetic construct
VTNVKVIRD

SEQ ID NO: 39851 - protein, 9 aa, synthetic construct
VLLDTAQAA

SEQ ID NO: 39852 - protein, 9 aa, synthetic construct
SGSSSSNSS

SEQ ID NO: 39853 - protein, 9 aa, synthetic construct
CTGARIVAV

SEQ ID NO: 39854 - protein, 9 aa, synthetic construct
NRGASLLAR

SEQ ID NO: 39855 - protein, 9 aa, synthetic construct
IVAVPTPLP

SEQ ID NO: 39856 - protein, 9 aa, synthetic construct
QEGDGQSPL

SEQ ID NO: 39857 - protein, 9 aa, synthetic construct
MEEVGIYRV

SEQ ID NO: 39858 - protein, 9 aa, synthetic construct
LRDPDSHIV

SEQ ID NO: 39859 - protein, 9 aa, synthetic construct
ILSPGYPSY

SEQ ID NO: 39860 - protein, 9 aa, synthetic construct
GLRNMAVAK

SEQ ID NO: 39861 - protein, 9 aa, synthetic construct
HLVSQSLNI

SEQ ID NO: 39862 - protein, 9 aa, synthetic construct
SLGRAQRQK

SEQ ID NO: 39863 - protein, 9 aa, synthetic construct
GTYPGIADR

SEQ ID NO: 39864 - protein, 9 aa, synthetic construct
LSYPPFVGH

SEQ ID NO: 39865 - protein, 9 aa, synthetic construct
KFTQFVHLK

SEQ ID NO: 39866 - protein, 9 aa, synthetic construct
ASDDSGLRR

SEQ ID NO: 39867 - protein, 9 aa, synthetic construct
VAKHNIMIK

SEQ ID NO: 39868 - protein, 9 aa, synthetic construct
LSRPHLPGK

SEQ ID NO: 39869 - protein, 9 aa, synthetic construct
QLSPHLPGK

SEQ ID NO: 39870 - protein, 9 aa, synthetic construct
VTAQRSVSK

SEQ ID NO: 39871 - protein, 9 aa, synthetic construct
YIKYVNLEE

SEQ ID NO: 39872 - protein, 9 aa, synthetic construct
RAQRQGILK

SEQ ID NO: 39873 - protein, 9 aa, synthetic construct
QLRNMAVAK

SEQ ID NO: 39874 - protein, 9 aa, synthetic construct
SLAPLLLHR

SEQ ID NO: 39875 - protein, 9 aa, synthetic construct
TINEYKMRK

SEQ ID NO: 39876 - protein, 9 aa, synthetic construct
TTMYPGIAR

SEQ ID NO: 39877 - protein, 9 aa, synthetic construct
AMYTGQSHK

SEQ ID NO: 39878 - protein, 9 aa, synthetic construct
AMYATGQSH

SEQ ID NO: 39879 - protein, 9 aa, synthetic construct
MLYPPFVGH

SEQ ID NO: 39880 - protein, 9 aa, synthetic construct
KMKEVASKY

SEQ ID NO: 39881 - protein, 9 aa, synthetic construct
VVYKPQMQK

SEQ ID NO: 39882 - protein, 9 aa, synthetic construct
YMRKEVASK

SEQ ID NO: 39883 - protein, 9 aa, synthetic construct
LVTESQSLK

SEQ ID NO: 39884 - protein, 9 aa, synthetic construct
LVTESQLNI

SEQ ID NO: 39885 - protein, 9 aa, synthetic construct
AQRQKGILK

SEQ ID NO: 39886 - protein, 9 aa, synthetic construct
LLHAPRVTR

SEQ ID NO: 39887 - protein, 9 aa, synthetic construct
VTSQSLNIK

SEQ ID NO: 39888 - protein, 9 aa, synthetic construct
TQFHLKLHK

SEQ ID NO: 39889 - protein, 9 aa, synthetic construct
KQMEDQKYK

SEQ ID NO: 39890 - protein, 9 aa, synthetic construct
VLKGSQLSR

SEQ ID NO: 39891 - protein, 9 aa, synthetic construct
KVFQVLNKK

SEQ ID NO: 39892 - protein, 9 aa, synthetic construct
ASDDSGLER

SEQ ID NO: 39893 - protein, 9 aa, synthetic construct
ATLPEVVYK

SEQ ID NO: 39894 - protein, 9 aa, synthetic construct
SLNIKATTK

SEQ ID NO: 39895 - protein, 9 aa, synthetic construct
ATAQRSVSK

SEQ ID NO: 39896 - protein, 9 aa, synthetic construct
NIISTVQAF

SEQ ID NO: 39897 - protein, 9 aa, synthetic construct
QVNEKKQIY

SEQ ID NO: 39898 - protein, 9 aa, synthetic construct
STPGRDLRF

SEQ ID NO: 39899 - protein, 9 aa, synthetic construct
NVSGGTTMY

SEQ ID NO: 39900 - protein, 9 aa, synthetic construct
MLTDPSQAR

SEQ ID NO: 39901 - protein, 9 aa, synthetic construct
PVIPTPHLL

SEQ ID NO: 39902 - protein, 9 aa, synthetic construct
RAVQLILLY

SEQ ID NO: 39903 - protein, 9 aa, synthetic construct
PVIPPHHYL

SEQ ID NO: 39904 - protein, 9 aa, synthetic construct
VVIPTPHHY

SEQ ID NO: 39905 - protein, 9 aa, synthetic construct
LTDPGSQAR

SEQ ID NO: 39906 - protein, 9 aa, synthetic construct
DTAQSVSKY

SEQ ID NO: 39907 - protein, 9 aa, synthetic construct
DVVLKGSQL

SEQ ID NO: 39908 - protein, 9 aa, synthetic construct
HAAEASSED

SEQ ID NO: 39909 - protein, 9 aa, synthetic construct
QIVELRQCW

SEQ ID NO: 39910 - protein, 9 aa, synthetic construct
DIAELQAYF

SEQ ID NO: 39911 - protein, 9 aa, synthetic construct
TMYPGIARM

SEQ ID NO: 39912 - protein, 9 aa, synthetic construct
ETPENHSNY

SEQ ID NO: 39913 - protein, 9 aa, synthetic construct
EANQTLDSY

SEQ ID NO: 39914 - protein, 9 aa, synthetic construct
YRWAFIPEA

SEQ ID NO: 39915 - protein, 9 aa, synthetic construct
EINEINGNW

SEQ ID NO: 39916 - protein, 9 aa, synthetic construct
RLRGGLVLY

SEQ ID NO: 39917 - protein, 9 aa, synthetic construct
LRFGDPLAF

SEQ ID NO: 39918 - protein, 9 aa, synthetic construct
QLNEKKQIY

SEQ ID NO: 39919 - protein, 9 aa, synthetic construct
NLSGGTTMY

SEQ ID NO: 39920 - protein, 9 aa, synthetic construct
GIALELQAY

SEQ ID NO: 39921 - protein, 9 aa, synthetic construct
AIALELQAY

SEQ ID NO: 39922 - protein, 9 aa, synthetic construct
NVLSGGTTY

SEQ ID NO: 39923 - protein, 9 aa, synthetic construct
WRHRPGAAL

SEQ ID NO: 39924 - protein, 9 aa, synthetic construct
IISTVPGAF

SEQ ID NO: 39925 - protein, 9 aa, synthetic construct
IMMAVMDAY

SEQ ID NO: 39926 - protein, 9 aa, synthetic construct
RAFIPEASD

SEQ ID NO: 39927 - protein, 9 aa, synthetic construct
LLKAPVLQY

SEQ ID NO: 39928 - protein, 9 aa, synthetic construct
VILSPGDSY

SEQ ID NO: 39929 - protein, 9 aa, synthetic construct
FQNEKKQIY

SEQ ID NO: 39930 - protein, 9 aa, synthetic construct
YAFIPEASD

SEQ ID NO: 39931 - protein, 8 aa, synthetic construct
PQMEDQKY

SEQ ID NO: 39932 - protein, 9 aa, synthetic construct
AQLAGDIAL

SEQ ID NO: 39933 - protein, 8 aa, synthetic construct
AQRSVSKY

SEQ ID NO: 39934 - protein, 9 aa, synthetic construct
APLPGQASL

SEQ ID NO: 39935 - protein, 9 aa, synthetic construct
NAEEASSED

SEQ ID NO: 39936 - protein, 9 aa, synthetic construct
SPNGRDLRF

SEQ ID NO: 39937 - protein, 9 aa, synthetic construct
APKENHSNY

SEQ ID NO: 39938 - protein, 8 aa, synthetic construct
SPGYPDSY

SEQ ID NO: 39939 - protein, 9 aa, synthetic construct
TPNDLRFGF

SEQ ID NO: 39940 - protein, 9 aa, synthetic construct
VPIPTPHHY

SEQ ID NO: 39941 - protein, 8 aa, synthetic construct
APVLQYLY

SEQ ID NO: 39942 - protein, 8 aa, synthetic construct
DPYGSQAR

SEQ ID NO: 39943 - protein, 9 aa, synthetic construct
DTAQRSVSY

SEQ ID NO: 39944 - protein, 9 aa, synthetic construct
IPVSASSTL

SEQ ID NO: 39945 - protein, 8 aa, synthetic construct
EPMESYFF

SEQ ID NO: 39946 - protein, 9 aa, synthetic construct
GPFEVIQVR

SEQ ID NO: 39947 - protein, 9 aa, synthetic construct
EPKENHSNY

SEQ ID NO: 39948 - protein, 9 aa, synthetic construct
EADNQTLSY

SEQ ID NO: 39949 - protein, 9 aa, synthetic construct
LPEFVVPQM

SEQ ID NO: 39950 - protein, 8 aa, synthetic construct
YPDSYPNL

SEQ ID NO: 39951 - protein, 8 aa, synthetic construct
MAVAKHNL

SEQ ID NO: 39952 - protein, 8 aa, synthetic construct
SAASSSTL

SEQ ID NO: 39953 - protein, 9 aa, synthetic construct
MAVAKHNIM

SEQ ID NO: 39954 - protein, 8 aa, synthetic construct
QTQPPAAL

SEQ ID NO: 39955 - protein, 9 aa, synthetic construct
YPDSPNLQM

SEQ ID NO: 39956 - protein, 9 aa, synthetic construct
PVIPTPHHL

SEQ ID NO: 39957 - protein, 8 aa, synthetic construct
RAVQLLIL

SEQ ID NO: 39958 - protein, 8 aa, synthetic construct
LVLKGSQL

SEQ ID NO: 39959 - protein, 8 aa, synthetic construct
KAPVLQYL

SEQ ID NO: 39960 - protein, 9 aa, synthetic construct
FVQSGRPHL

SEQ ID NO: 39961 - protein, 8 aa, synthetic construct
VLYRAVQL

SEQ ID NO: 39962 - protein, 8 aa, synthetic construct
FVVYKPQM

SEQ ID NO: 39963 - protein, 9 aa, synthetic construct
GFDPQGALM

SEQ ID NO: 39964 - protein, 9 aa, synthetic construct
HYEPMESYF

SEQ ID NO: 39965 - protein, 8 aa, synthetic construct
SDDSGLEV

SEQ ID NO: 39966 - protein, 8 aa, synthetic construct
RYDPCRSA

SEQ ID NO: 39967 - protein, 8 aa, synthetic construct
FRDERELL

SEQ ID NO: 39968 - protein, 9 aa, synthetic construct
VIPTPHHYL

SEQ ID NO: 39969 - protein, 9 aa, synthetic construct
RYDPCRSAI

SEQ ID NO: 39970 - protein, 8 aa, synthetic construct
VADTAQRS

SEQ ID NO: 39971 - protein, 9 aa, synthetic construct
TFDYFGVCS

SEQ ID NO: 39972 - protein, 9 aa, synthetic construct
FVQLSGRPH

SEQ ID NO: 39973 - protein, 9 aa, synthetic construct
YAIKYVNLE

SEQ ID NO: 39974 - protein, 9 aa, synthetic construct
LGVRGGLVL

SEQ ID NO: 39975 - protein, 9 aa, synthetic construct
YEPMESYFF

SEQ ID NO: 39976 - protein, 9 aa, synthetic construct
FVVLGNKID

SEQ ID NO: 39977 - protein, 9 aa, synthetic construct
FDPQGALRN

SEQ ID NO: 39978 - protein, 9 aa, synthetic construct
YIQAKDKGA

SEQ ID NO: 39979 - protein, 9 aa, synthetic construct
YIMLSGYPP

SEQ ID NO: 39980 - protein, 9 aa, synthetic construct
ISCVAENLV

SEQ ID NO: 39981 - protein, 9 aa, synthetic construct
YVNLEEADN

SEQ ID NO: 39982 - protein, 9 aa, synthetic construct
FVVYKPQME

SEQ ID NO: 39983 - protein, 9 aa, synthetic construct
LATLPEFVV

SEQ ID NO: 39984 - protein, 9 aa, synthetic construct
FFKETSHES

SEQ ID NO: 39985 - protein, 9 aa, synthetic construct
YKMRKEVAS

SEQ ID NO: 39986 - protein, 9 aa, synthetic construct
WWREGTLAV

SEQ ID NO: 39987 - protein, 9 aa, synthetic construct
YRATGQSHK

SEQ ID NO: 39988 - protein, 9 aa, synthetic construct
LAKQLAGDI

SEQ ID NO: 39989 - protein, 9 aa, synthetic construct
FQVLNEKKQ

SEQ ID NO: 39990 - protein, 9 aa, synthetic construct
RLGVRGGLV

SEQ ID NO: 39991 - protein, 9 aa, synthetic construct
FIPEASDDS

SEQ ID NO: 39992 - protein, 9 aa, synthetic construct
MYRATGQSH

SEQ ID NO: 39993 - protein, 9 aa, synthetic construct
IYAIKYVNL

SEQ ID NO: 39994 - protein, 9 aa, synthetic construct
EEEEEVQAM

SEQ ID NO: 39995 - protein, 9 aa, synthetic construct
YMLTDPYGS

SEQ ID NO: 39996 - protein, 9 aa, synthetic construct
FGQTAGWRH

SEQ ID NO: 39997 - protein, 9 aa, synthetic construct
FGGFDPQGA

SEQ ID NO: 39998 - protein, 9 aa, synthetic construct
LNIMIKRYN

SEQ ID NO: 39999 - protein, 9 aa, synthetic construct
VILSPGYPD

SEQ ID NO: 40000 - protein, 9 aa, synthetic construct
MAAGCRLEE

SEQ ID NO: 40001 - protein, 9 aa, synthetic construct
IQQLEKSDA

SEQ ID NO: 40002 - protein, 9 aa, synthetic construct
IYIQAKDKG

SEQ ID NO: 40003 - protein, 9 aa, synthetic construct
IDLENRQVA

SEQ ID NO: 40004 - protein, 9 aa, synthetic construct
FAETPKENH

SEQ ID NO: 40005 - protein, 9 aa, synthetic construct
FVHLKLHKR

SEQ ID NO: 40006 - protein, 9 aa, synthetic construct
VNLEEADNQ

SEQ ID NO: 40007 - protein, 9 aa, synthetic construct
WISASSINE

SEQ ID NO: 40008 - protein, 9 aa, synthetic construct
VVYKPQMED

SEQ ID NO: 40009 - protein, 9 aa, synthetic construct
FTQFVHLKL

SEQ ID NO: 40010 - protein, 9 aa, synthetic construct
YFFKETSHE

SEQ ID NO: 40011 - protein, 9 aa, synthetic construct
RGLHTRAYE

SEQ ID NO: 40012 - protein, 9 aa, synthetic construct
IQAKDKGAN

SEQ ID NO: 40013 - protein, 9 aa, synthetic construct
MAVAKHNLN

SEQ ID NO: 40014 - protein, 9 aa, synthetic construct
YRCVIRSDG

SEQ ID NO: 40015 - protein, 9 aa, synthetic construct
LETLPEFRD

SEQ ID NO: 40016 - protein, 9 aa, synthetic construct
LKLHKRLHT

SEQ ID NO: 40017 - protein, 9 aa, synthetic construct
LRITNISSD

SEQ ID NO: 40018 - protein, 9 aa, synthetic construct
ILINNIPDE

SEQ ID NO: 40019 - protein, 9 aa, synthetic construct
VVRNRRLGV

SEQ ID NO: 40020 - protein, 9 aa, synthetic construct
VLGNKIDLE

SEQ ID NO: 40021 - protein, 9 aa, synthetic construct
TRAYEDTAD

SEQ ID NO: 40022 - protein, 9 aa, synthetic construct
QVGAEVQFR

SEQ ID NO: 40023 - protein, 9 aa, synthetic construct
VSVADTAQR

SEQ ID NO: 40024 - protein, 9 aa, synthetic construct
AAAATTAAA

SEQ ID NO: 40025 - protein, 9 aa, synthetic construct
WREGTLAVR

SEQ ID NO: 40026 - protein, 9 aa, synthetic construct
IKYVNLEEA

SEQ ID NO: 40027 - protein, 9 aa, synthetic construct
NHAAEEASS

SEQ ID NO: 40028 - protein, 9 aa, synthetic construct
RSRSRSASS

SEQ ID NO: 40029 - protein, 9 aa, synthetic construct
RSRSRSRSA

SEQ ID NO: 40030 - protein, 9 aa, synthetic construct
DKGANPEGA

SEQ ID NO: 40031 - protein, 9 aa, synthetic construct
INGNWISAS

SEQ ID NO: 40032 - protein, 9 aa, synthetic construct
VRGGLVLYN

SEQ ID NO: 40033 - protein, 9 aa, synthetic construct
ETAAAATTA

SEQ ID NO: 40034 - protein, 9 aa, synthetic construct
SRSASSNSR

SEQ ID NO: 40035 - protein, 9 aa, synthetic construct
EENAGTEEI

SEQ ID NO: 40036 - protein, 9 aa, synthetic construct
ERATEAENV

SEQ ID NO: 40037 - protein, 9 aa, synthetic construct
TTAAAASSS

SEQ ID NO: 40038 - protein, 9 aa, synthetic construct
QRVTHSDIS

SEQ ID NO: 40039 - protein, 9 aa, synthetic construct
PYGSQARLG

SEQ ID NO: 40040 - protein, 9 aa, synthetic construct
SGGTTMYPG

SEQ ID NO: 40041 - protein, 9 aa, synthetic construct
ISASSINEA

SEQ ID NO: 40042 - protein, 9 aa, synthetic construct
TTTATTIGS

SEQ ID NO: 40043 - protein, 9 aa, synthetic construct
IHLVTESQS

SEQ ID NO: 40044 - protein, 9 aa, synthetic construct
AAASSSAAS

SEQ ID NO: 40045 - protein, 9 aa, synthetic construct
PQGALRNMA

SEQ ID NO: 40046 - protein, 9 aa, synthetic construct
TAAAASSSA

SEQ ID NO: 40047 - protein, 9 aa, synthetic construct
TIGSETTTA

SEQ ID NO: 40048 - protein, 9 aa, synthetic construct
LEKSDAEYT

SEQ ID NO: 40049 - protein, 9 aa, synthetic construct
AAAASSSAA

SEQ ID NO: 40050 - protein, 9 aa, synthetic construct
LRFGFDPLA

SEQ ID NO: 40051 - protein, 9 aa, synthetic construct
LRNMAVAKH

SEQ ID NO: 40052 - protein, 9 aa, synthetic construct
RSRSASSNS

SEQ ID NO: 40053 - protein, 9 aa, synthetic construct
VTHSDISDP

SEQ ID NO: 40054 - protein, 9 aa, synthetic construct
ATTAAAASS

SEQ ID NO: 40055 - protein, 9 aa, synthetic construct
VRGDPGGER

SEQ ID NO: 40056 - protein, 9 aa, synthetic construct
IEDGSTPNG

SEQ ID NO: 40057 - protein, 9 aa, synthetic construct
IMGSMAVMD

SEQ ID NO: 40058 - protein, 9 aa, synthetic construct
QLSARAADG

SEQ ID NO: 40059 - protein, 9 aa, synthetic construct
REGTLAVRG

SEQ ID NO: 40060 - protein, 9 aa, synthetic construct
LDSYRNEIA

SEQ ID NO: 40061 - protein, 9 aa, synthetic construct
VDTFQDYFG

SEQ ID NO: 40062 - protein, 9 aa, synthetic construct
NTNINEYKM

SEQ ID NO: 40063 - protein, 9 aa, synthetic construct
RVTHSDISD

SEQ ID NO: 40064 - protein, 9 aa, synthetic construct
PDSYPNLQM

SEQ ID NO: 40065 - protein, 9 aa, synthetic construct
MDAYLVEQN

SEQ ID NO: 40066 - protein, 9 aa, synthetic construct
INEYKMRKE

SEQ ID NO: 40067 - protein, 9 aa, synthetic construct
MAVMDAYLV

SEQ ID NO: 40068 - protein, 9 aa, synthetic construct
INNIPDESQ

SEQ ID NO: 40069 - protein, 9 aa, synthetic construct
DAEYTNSPL

SEQ ID NO: 40070 - protein, 9 aa, synthetic construct
HSNYRTLLE

SEQ ID NO: 40071 - protein, 9 aa, synthetic construct
YFGVCSEPV

SEQ ID NO: 40072 - protein, 9 aa, synthetic construct
MESYFFKET

SEQ ID NO: 40073 - protein, 9 aa, synthetic construct
WYGQEIVEL

SEQ ID NO: 40074 - protein, 9 aa, synthetic construct
WRVYDVLVL

SEQ ID NO: 40075 - protein, 9 aa, synthetic construct
NWRVYDVLV

SEQ ID NO: 40076 - protein, 9 aa, synthetic construct
LHDWYGQEI

SEQ ID NO: 40077 - protein, 9 aa, synthetic construct
EEEYEDDAY

SEQ ID NO: 40078 - protein, 9 aa, synthetic construct
PEGAHCKVL

SEQ ID NO: 40079 - protein, 9 aa, synthetic construct
CRSADIALV

SEQ ID NO: 40080 - protein, 9 aa, synthetic construct
PGQASLLQA

SEQ ID NO: 40081 - protein, 9 aa, synthetic construct
PETAAAATT

SEQ ID NO: 40082 - protein, 9 aa, synthetic construct
ILWVQAMYR

SEQ ID NO: 40083 - protein, 9 aa, synthetic construct
FRDERELLR

SEQ ID NO: 40084 - protein, 9 aa, synthetic construct
ITNISSDDS

SEQ ID NO: 40085 - protein, 9 aa, synthetic construct
VSKYRCVIR

SEQ ID NO: 40086 - protein, 9 aa, synthetic construct
LAVRGDPGG

SEQ ID NO: 40087 - protein, 9 aa, synthetic construct
GSPLPGVKY

SEQ ID NO: 40088 - protein, 9 aa, synthetic construct
QEEYSAMQY

SEQ ID NO: 40089 - protein, 9 aa, synthetic construct
SGGPLMHSY

SEQ ID NO: 40090 - protein, 9 aa, synthetic construct
AVGGDGQAY

SEQ ID NO: 40091 - protein, 9 aa, synthetic construct
VSSSEQLQY

SEQ ID NO: 40092 - protein, 9 aa, synthetic construct
IADNGGLKY

SEQ ID NO: 40093 - protein, 9 aa, synthetic construct
ELPLHLNRY

SEQ ID NO: 40094 - protein, 9 aa, synthetic construct
LVNMGGEQY

SEQ ID NO: 40095 - protein, 9 aa, synthetic construct
YTMAYTPTY

SEQ ID NO: 40096 - protein, 9 aa, synthetic construct
ILDTAGQEY

SEQ ID NO: 40097 - protein, 9 aa, synthetic construct
TEEKPYEEY

SEQ ID NO: 40098 - protein, 9 aa, synthetic construct
LDQEDALLY

SEQ ID NO: 40099 - protein, 9 aa, synthetic construct
SSAYGLVHY

SEQ ID NO: 40100 - protein, 9 aa, synthetic construct
FVTLAGSEF

SEQ ID NO: 40101 - protein, 9 aa, synthetic construct
VTNPQGMVT

SEQ ID NO: 40102 - protein, 9 aa, synthetic construct
GSQLAPEHY

SEQ ID NO: 40103 - protein, 9 aa, synthetic construct
TSGGPLMHY

SEQ ID NO: 40104 - protein, 9 aa, synthetic construct
TTDYLHLLQ

SEQ ID NO: 40105 - protein, 9 aa, synthetic construct
LSYSGYTPY

SEQ ID NO: 40106 - protein, 9 aa, synthetic construct
VSSEQLQSY

SEQ ID NO: 40107 - protein, 9 aa, synthetic construct
MTAEEGRIY

SEQ ID NO: 40108 - protein, 8 aa, synthetic construct
ITDVDFIY

SEQ ID NO: 40109 - protein, 8 aa, synthetic construct
SSEQLQSY

SEQ ID NO: 40110 - protein, 9 aa, synthetic construct
SCQPYSAFY

SEQ ID NO: 40111 - protein, 9 aa, synthetic construct
IFDRTDIQC

SEQ ID NO: 40112 - protein, 9 aa, synthetic construct
FQEALRPRY

SEQ ID NO: 40113 - protein, 8 aa, synthetic construct
LTDSCQPY

SEQ ID NO: 40114 - protein, 9 aa, synthetic construct
YAVGDGQAY

SEQ ID NO: 40115 - protein, 9 aa, synthetic construct
QIDRTDIQC

SEQ ID NO: 40116 - protein, 8 aa, synthetic construct
GSAVGGGY

SEQ ID NO: 40117 - protein, 8 aa, synthetic construct
VTLAGSEF

SEQ ID NO: 40118 - protein, 9 aa, synthetic construct
ILSAVGGGY

SEQ ID NO: 40119 - protein, 8 aa, synthetic construct
VTNIPQGM

SEQ ID NO: 40120 - protein, 9 aa, synthetic construct
VSTDVDFIY

SEQ ID NO: 40121 - protein, 9 aa, synthetic construct
LISAVGGGY

SEQ ID NO: 40122 - protein, 8 aa, synthetic construct
DTAGQEEY

SEQ ID NO: 40123 - protein, 9 aa, synthetic construct
LLMGGEQVY

SEQ ID NO: 40124 - protein, 9 aa, synthetic construct
QIEALRPRY

SEQ ID NO: 40125 - protein, 8 aa, synthetic construct
IMAYTPTY

SEQ ID NO: 40126 - protein, 9 aa, synthetic construct
CLELTDSCY

SEQ ID NO: 40127 - protein, 9 aa, synthetic construct
YSDQEDALL

SEQ ID NO: 40128 - protein, 9 aa, synthetic construct
DVDFIQNEF

SEQ ID NO: 40129 - protein, 9 aa, synthetic construct
LGDKAVGGY

SEQ ID NO: 40130 - protein, 9 aa, synthetic construct
PTPSSASAY

SEQ ID NO: 40131 - protein, 9 aa, synthetic construct
DSCQPSAFY

SEQ ID NO: 40132 - protein, 9 aa, synthetic construct
RIESLIDRY

SEQ ID NO: 40133 - protein, 8 aa, synthetic construct
FEDDTGRY

SEQ ID NO: 40134 - protein, 9 aa, synthetic construct
TADYLHLLQ

SEQ ID NO: 40135 - protein, 9 aa, synthetic construct
LSDKGTLQL

SEQ ID NO: 40136 - protein, 9 aa, synthetic construct
DVFSIELFH

SEQ ID NO: 40137 - protein, 9 aa, synthetic construct
EAEDDTGRY

SEQ ID NO: 40138 - protein, 9 aa, synthetic construct
VVSDVDFIY

SEQ ID NO: 40139 - protein, 9 aa, synthetic construct
DQEDALLSY

SEQ ID NO: 40140 - protein, 9 aa, synthetic construct
KMIDFLIPV

SEQ ID NO: 40141 - protein, 9 aa, synthetic construct
AVYDGQAYL

SEQ ID NO: 40142 - protein, 9 aa, synthetic construct
SVLESVLLI

SEQ ID NO: 40143 - protein, 9 aa, synthetic construct
SLKNLVPQI

SEQ ID NO: 40144 - protein, 9 aa, synthetic construct
ALLSQEIEM

SEQ ID NO: 40145 - protein, 9 aa, synthetic construct
YLVPITQTL

SEQ ID NO: 40146 - protein, 9 aa, synthetic construct
YLLSGTPYT

SEQ ID NO: 40147 - protein, 9 aa, synthetic construct
TMYDLDEFL

SEQ ID NO: 40148 - protein, 9 aa, synthetic construct
AILGGPPNV

SEQ ID NO: 40149 - protein, 9 aa, synthetic construct
KLLNVIQDL

SEQ ID NO: 40150 - protein, 9 aa, synthetic construct
YLDQEDALL

SEQ ID NO: 40151 - protein, 9 aa, synthetic construct
QLAPEHYEI

SEQ ID NO: 40152 - protein, 9 aa, synthetic construct
SLDQEDALL

SEQ ID NO: 40153 - protein, 9 aa, synthetic construct
GVLESSVLL

SEQ ID NO: 40154 - protein, 9 aa, synthetic construct
YMYGMALTV

SEQ ID NO: 40155 - protein, 9 aa, synthetic construct
QLLSASQEI

SEQ ID NO: 40156 - protein, 9 aa, synthetic construct
YLDPGAGSL

SEQ ID NO: 40157 - protein, 9 aa, synthetic construct
GMVPVPPAA

SEQ ID NO: 40158 - protein, 9 aa, synthetic construct
GMVPVLPPA

SEQ ID NO: 40159 - protein, 9 aa, synthetic construct
MLAGPHPTL

SEQ ID NO: 40160 - protein, 9 aa, synthetic construct
VLGDKLYAV

SEQ ID NO: 40161 - protein, 9 aa, synthetic construct
MMVPGNAGV

SEQ ID NO: 40162 - protein, 9 aa, synthetic construct
FLGGTLHPA

SEQ ID NO: 40163 - protein, 9 aa, synthetic construct
MIPDFLIPV

SEQ ID NO: 40164 - protein, 9 aa, synthetic construct
CLLDKLYAV

SEQ ID NO: 40165 - protein, 9 aa, synthetic construct
FVLESSVLL

SEQ ID NO: 40166 - protein, 9 aa, synthetic construct
TQGELRPEV

SEQ ID NO: 40167 - protein, 9 aa, synthetic construct
YLAGSEFFL

SEQ ID NO: 40168 - protein, 9 aa, synthetic construct
LLIDGILVA

SEQ ID NO: 40169 - protein, 9 aa, synthetic construct
YTHEEISLV

SEQ ID NO: 40170 - protein, 9 aa, synthetic construct
LLVNGGEQV

SEQ ID NO: 40171 - protein, 8 aa, synthetic construct
ELENIATL

SEQ ID NO: 40172 - protein, 8 aa, synthetic construct
VLESSVLL

SEQ ID NO: 40173 - protein, 9 aa, synthetic construct
KLVPQINLA

SEQ ID NO: 40174 - protein, 9 aa, synthetic construct
FMWTAELEI

SEQ ID NO: 40175 - protein, 9 aa, synthetic construct
VLAGSEFFL

SEQ ID NO: 40176 - protein, 9 aa, synthetic construct
SLNGDLLEA

SEQ ID NO: 40177 - protein, 9 aa, synthetic construct
LLANVAHAV

SEQ ID NO: 40178 - protein, 9 aa, synthetic construct
FLDNYITEL

SEQ ID NO: 40179 - protein, 8 aa, synthetic construct
KLDQEDAL

SEQ ID NO: 40180 - protein, 9 aa, synthetic construct
TYISSVLQA

SEQ ID NO: 40181 - protein, 9 aa, synthetic construct
HLAFQIYEL

SEQ ID NO: 40182 - protein, 9 aa, synthetic construct
TLAGEFFLL

SEQ ID NO: 40183 - protein, 9 aa, synthetic construct
TLADHLLQA

SEQ ID NO: 40184 - protein, 9 aa, synthetic construct
TLADYLHLL

SEQ ID NO: 40185 - protein, 8 aa, synthetic construct
WLLPPGTL

SEQ ID NO: 40186 - protein, 9 aa, synthetic construct
RLDGSPLKV

SEQ ID NO: 40187 - protein, 9 aa, synthetic construct
KLKLAHFAI

SEQ ID NO: 40188 - protein, 9 aa, synthetic construct
PPRSTSSSG

SEQ ID NO: 40189 - protein, 9 aa, synthetic construct
SPLMHSPYF

SEQ ID NO: 40190 - protein, 8 aa, synthetic construct
APERHYEI

SEQ ID NO: 40191 - protein, 9 aa, synthetic construct
RPGGRETPQ

SEQ ID NO: 40192 - protein, 9 aa, synthetic construct
APRASTSSS

SEQ ID NO: 40193 - protein, 9 aa, synthetic construct
NPTLQAAEL

SEQ ID NO: 40194 - protein, 9 aa, synthetic construct
IPMPPSSPP

SEQ ID NO: 40195 - protein, 9 aa, synthetic construct
KPSSGSGSS

SEQ ID NO: 40196 - protein, 8 aa, synthetic construct
ASRSFSEL

SEQ ID NO: 40197 - protein, 9 aa, synthetic construct
LPAAPGRAA

SEQ ID NO: 40198 - protein, 9 aa, synthetic construct
SPNGTLVNM

SEQ ID NO: 40199 - protein, 9 aa, synthetic construct
APPGRRREL

SEQ ID NO: 40200 - protein, 9 aa, synthetic construct
LPMTARQRV

SEQ ID NO: 40201 - protein, 9 aa, synthetic construct
GPPFASRSF

SEQ ID NO: 40202 - protein, 9 aa, synthetic construct
PPFASRSEL

SEQ ID NO: 40203 - protein, 9 aa, synthetic construct
SPQPRGAPQ

SEQ ID NO: 40204 - protein, 9 aa, synthetic construct
LPHAGARPW

SEQ ID NO: 40205 - protein, 9 aa, synthetic construct
GPQIKGPKL

SEQ ID NO: 40206 - protein, 9 aa, synthetic construct
APGDPQRGF

SEQ ID NO: 40207 - protein, 9 aa, synthetic construct
YPYGMALTV

SEQ ID NO: 40208 - protein, 9 aa, synthetic construct
VPALPPAAV

SEQ ID NO: 40209 - protein, 9 aa, synthetic construct
GPRASTSSS

SEQ ID NO: 40210 - protein, 9 aa, synthetic construct
PPVSSGSSS

SEQ ID NO: 40211 - protein, 9 aa, synthetic construct
APCQSRCSL

SEQ ID NO: 40212 - protein, 8 aa, synthetic construct
PPFASRSF

SEQ ID NO: 40213 - protein, 9 aa, synthetic construct
QPGGRETPQ

SEQ ID NO: 40214 - protein, 9 aa, synthetic construct
PPPPGSPNI

SEQ ID NO: 40215 - protein, 9 aa, synthetic construct
RPMPPSSPQ

SEQ ID NO: 40216 - protein, 9 aa, synthetic construct
NPSDPRAST

SEQ ID NO: 40217 - protein, 9 aa, synthetic construct
NPHPRASTI

SEQ ID NO: 40218 - protein, 9 aa, synthetic construct
KPGDPQRGF

SEQ ID NO: 40219 - protein, 9 aa, synthetic construct
EPKFLEVKL

SEQ ID NO: 40220 - protein, 8 aa, synthetic construct
IPMPPSSP

SEQ ID NO: 40221 - protein, 8 aa, synthetic construct
RATASGVM

SEQ ID NO: 40222 - protein, 9 aa, synthetic construct
HPYGMALTV

SEQ ID NO: 40223 - protein, 9 aa, synthetic construct
APRRRSLKL

SEQ ID NO: 40224 - protein, 9 aa, synthetic construct
FPPFASRSF

SEQ ID NO: 40225 - protein, 9 aa, synthetic construct
MPAVSPGMV

SEQ ID NO: 40226 - protein, 9 aa, synthetic construct
GPSGILSYL

SEQ ID NO: 40227 - protein, 9 aa, synthetic construct
MPSPQPRGA

SEQ ID NO: 40228 - protein, 9 aa, synthetic construct
TPQGRPEVV

SEQ ID NO: 40229 - protein, 9 aa, synthetic construct
TPQGLRPEV

SEQ ID NO: 40230 - protein, 9 aa, synthetic construct
SPRASTIFL

SEQ ID NO: 40231 - protein, 9 aa, synthetic construct
MPYGALTVI

SEQ ID NO: 40232 - protein, 9 aa, synthetic construct
NPVISGQIV

SEQ ID NO: 40233 - protein, 9 aa, synthetic construct
ILRKPALEF

SEQ ID NO: 40234 - protein, 9 aa, synthetic construct
RPHPTKGTW

SEQ ID NO: 40235 - protein, 9 aa, synthetic construct
HIRLEKPAL

SEQ ID NO: 40236 - protein, 9 aa, synthetic construct
KPHSLLRRI

SEQ ID NO: 40237 - protein, 9 aa, synthetic construct
SLRLEKPAL

SEQ ID NO: 40238 - protein, 9 aa, synthetic construct
VPGMVPVAL

SEQ ID NO: 40239 - protein, 8 aa, synthetic construct
VPILTQTL

SEQ ID NO: 40240 - protein, 9 aa, synthetic construct
APGRRRELL

SEQ ID NO: 40241 - protein, 8 aa, synthetic construct
SPQPRGAP

SEQ ID NO: 40242 - protein, 9 aa, synthetic construct
QPRSAFYIL

SEQ ID NO: 40243 - protein, 9 aa, synthetic construct
LLEKPALEF

SEQ ID NO: 40244 - protein, 8 aa, synthetic construct
AGRPHPTL

SEQ ID NO: 40245 - protein, 8 aa, synthetic construct
KLKLAHFA

SEQ ID NO: 40246 - protein, 9 aa, synthetic construct
MPKLKGPQV

SEQ ID NO: 40247 - protein, 8 aa, synthetic construct
PPRASTSS

SEQ ID NO: 40248 - protein, 9 aa, synthetic construct
GPSGICLSL

SEQ ID NO: 40249 - protein, 9 aa, synthetic construct
SPMPPSSPQ

SEQ ID NO: 40250 - protein, 8 aa, synthetic construct
NRNREEML

SEQ ID NO: 40251 - protein, 9 aa, synthetic construct
TALENIATL

SEQ ID NO: 40252 - protein, 8 aa, synthetic construct
SLVSKGTL

SEQ ID NO: 40253 - protein, 8 aa, synthetic construct
APERHYEI

SEQ ID NO: 40254 - protein, 9 aa, synthetic construct
RLKLVITAL

SEQ ID NO: 40255 - protein, 8 aa, synthetic construct
VISMRCMV

SEQ ID NO: 40256 - protein, 8 aa, synthetic construct
RGHRVHEL

SEQ ID NO: 40257 - protein, 9 aa, synthetic construct
HTMGRLLSL

SEQ ID NO: 40258 - protein, 8 aa, synthetic construct
VNRNREEM

SEQ ID NO: 40259 - protein, 9 aa, synthetic construct
SRRHRVHEL

SEQ ID NO: 40260 - protein, 8 aa, synthetic construct
TMILQAVV

SEQ ID NO: 40261 - protein, 8 aa, synthetic construct
LRLEKPAL

SEQ ID NO: 40262 - protein, 9 aa, synthetic construct
ELRPRYLEI

SEQ ID NO: 40263 - protein, 8 aa, synthetic construct
HTMGRALL

SEQ ID NO: 40264 - protein, 9 aa, synthetic construct
NLAAKIAVL

SEQ ID NO: 40265 - protein, 8 aa, synthetic construct
YMPYGMAL

SEQ ID NO: 40266 - protein, 9 aa, synthetic construct
HSLLRRIAL

SEQ ID NO: 40267 - protein, 8 aa, synthetic construct
SSPRTISF

SEQ ID NO: 40268 - protein, 9 aa, synthetic construct
IFRDRTQCL

SEQ ID NO: 40269 - protein, 9 aa, synthetic construct
MLAGRPHTL

SEQ ID NO: 40270 - protein, 8 aa, synthetic construct
LCEVKLAF

SEQ ID NO: 40271 - protein, 8 aa, synthetic construct
LGDKLYAV

SEQ ID NO: 40272 - protein, 9 aa, synthetic construct
SLLRRIQQL

SEQ ID NO: 40273 - protein, 9 aa, synthetic construct
WVKRKISSV

SEQ ID NO: 40274 - protein, 8 aa, synthetic construct
DGKSIRTF

SEQ ID NO: 40275 - protein, 8 aa, synthetic construct
EALRPRYL

SEQ ID NO: 40276 - protein, 8 aa, synthetic construct
TLAEHKEL

SEQ ID NO: 40277 - protein, 9 aa, synthetic construct
YLRPRYLEI

SEQ ID NO: 40278 - protein, 9 aa, synthetic construct
DLKKRIESL

SEQ ID NO: 40279 - protein, 9 aa, synthetic construct
HLRLEKPAL

SEQ ID NO: 40280 - protein, 8 aa, synthetic construct
VPILTQTL

SEQ ID NO: 40281 - protein, 8 aa, synthetic construct
FVNKQPTL

SEQ ID NO: 40282 - protein, 8 aa, synthetic construct
HLFRGLSL

SEQ ID NO: 40283 - protein, 8 aa, synthetic construct
AGRPHPTL

SEQ ID NO: 40284 - protein, 8 aa, synthetic construct
AFSKVSTL

SEQ ID NO: 40285 - protein, 8 aa, synthetic construct
SQKKIAKI

SEQ ID NO: 40286 - protein, 8 aa, synthetic construct
VLAAKIAV

SEQ ID NO: 40287 - protein, 8 aa, synthetic construct
RRSLKKNL

SEQ ID NO: 40288 - protein, 9 aa, synthetic construct
KRYGAVIKL

SEQ ID NO: 40289 - protein, 9 aa, synthetic construct
SRTGEVVSM

SEQ ID NO: 40290 - protein, 9 aa, synthetic construct
GRVNIPQGM

SEQ ID NO: 40291 - protein, 9 aa, synthetic construct
KRIESLIDY

SEQ ID NO: 40292 - protein, 8 aa, synthetic construct
LRRIAQQL

SEQ ID NO: 40293 - protein, 9 aa, synthetic construct
GRSWPPGTL

SEQ ID NO: 40294 - protein, 9 aa, synthetic construct
SRRGHVHEL

SEQ ID NO: 40295 - protein, 9 aa, synthetic construct
SRSDSDQVL

SEQ ID NO: 40296 - protein, 8 aa, synthetic construct
PRTISFRM

SEQ ID NO: 40297 - protein, 9 aa, synthetic construct
KRSSPTISF

SEQ ID NO: 40298 - protein, 9 aa, synthetic construct
IFRDRTIQC

SEQ ID NO: 40299 - protein, 9 aa, synthetic construct
FRDRTDIQL

SEQ ID NO: 40300 - protein, 9 aa, synthetic construct
MRFEAGHVL

SEQ ID NO: 40301 - protein, 9 aa, synthetic construct
RRTDIQCLI

SEQ ID NO: 40302 - protein, 9 aa, synthetic construct
THYPYGMAL

SEQ ID NO: 40303 - protein, 9 aa, synthetic construct
CRNLLDRTF

SEQ ID NO: 40304 - protein, 8 aa, synthetic construct
DRTDIQCL

SEQ ID NO: 40305 - protein, 8 aa, synthetic construct
RRLDGSPL

SEQ ID NO: 40306 - protein, 9 aa, synthetic construct
LRLEKPLEF

SEQ ID NO: 40307 - protein, 9 aa, synthetic construct
SRIKGLKSL

SEQ ID NO: 40308 - protein, 9 aa, synthetic construct
FYFLGGTRL

SEQ ID NO: 40309 - protein, 9 aa, synthetic construct
IYALRPRYL

SEQ ID NO: 40310 - protein, 9 aa, synthetic construct
GQPPFSRSF

SEQ ID NO: 40311 - protein, 9 aa, synthetic construct
FYVTGSEFF

SEQ ID NO: 40312 - protein, 9 aa, synthetic construct
FYVTAGSEF

SEQ ID NO: 40313 - protein, 8 aa, synthetic construct
YMPYGMAL

SEQ ID NO: 40314 - protein, 9 aa, synthetic construct
LYHEEYISL

SEQ ID NO: 40315 - protein, 9 aa, synthetic construct
FRDTDIQCL

SEQ ID NO: 40316 - protein, 9 aa, synthetic construct
KHPDPQRGF

SEQ ID NO: 40317 - protein, 8 aa, synthetic construct
FHTMGRAL

SEQ ID NO: 40318 - protein, 8 aa, synthetic construct
THEEYISL

SEQ ID NO: 40319 - protein, 9 aa, synthetic construct
TYMPYGMAL

SEQ ID NO: 40320 - protein, 9 aa, synthetic construct
LRLEPALEF

SEQ ID NO: 40321 - protein, 9 aa, synthetic construct
FYMAYTPTY

SEQ ID NO: 40322 - protein, 9 aa, synthetic construct
FYSKLDQEL

SEQ ID NO: 40323 - protein, 9 aa, synthetic construct
IVPSSASAY

SEQ ID NO: 40324 - protein, 9 aa, synthetic construct
IILSGSQLA

SEQ ID NO: 40325 - protein, 9 aa, synthetic construct
LKKNLVPQI

SEQ ID NO: 40326 - protein, 9 aa, synthetic construct
YLMYSTVSG

SEQ ID NO: 40327 - protein, 9 aa, synthetic construct
VVSMKRMVH

SEQ ID NO: 40328 - protein, 9 aa, synthetic construct
FNPSDHPRA

SEQ ID NO: 40329 - protein, 9 aa, synthetic construct
LAKANKWTG

SEQ ID NO: 40330 - protein, 9 aa, synthetic construct
IADNGGLKA

SEQ ID NO: 40331 - protein, 9 aa, synthetic construct
LQRHHSVEA

SEQ ID NO: 40332 - protein, 9 aa, synthetic construct
LLANVAHAN

SEQ ID NO: 40333 - protein, 9 aa, synthetic construct
LHLNKRYGA

SEQ ID NO: 40334 - protein, 9 aa, synthetic construct
MMSNPPVRA

SEQ ID NO: 40335 - protein, 9 aa, synthetic construct
LVPQINLAS

SEQ ID NO: 40336 - protein, 9 aa, synthetic construct
YWLDPAKTL

SEQ ID NO: 40337 - protein, 9 aa, synthetic construct
FSKVSTLNT

SEQ ID NO: 40338 - protein, 9 aa, synthetic construct
LSLNGDLLA

SEQ ID NO: 40339 - protein, 9 aa, synthetic construct
YEISRDGRL

SEQ ID NO: 40340 - protein, 9 aa, synthetic construct
FVNKQPTLQ

SEQ ID NO: 40341 - protein, 9 aa, synthetic construct
FKESPKQIL

SEQ ID NO: 40342 - protein, 9 aa, synthetic construct
IEMHADNPA

SEQ ID NO: 40343 - protein, 9 aa, synthetic construct
YHMDASGEA

SEQ ID NO: 40344 - protein, 9 aa, synthetic construct
DALLGSYPV

SEQ ID NO: 40345 - protein, 9 aa, synthetic construct
LTGNVNVLA

SEQ ID NO: 40346 - protein, 9 aa, synthetic construct
ISSNAAILG

SEQ ID NO: 40347 - protein, 9 aa, synthetic construct
MTARQRVWR

SEQ ID NO: 40348 - protein, 9 aa, synthetic construct
WQPVSRIPM

SEQ ID NO: 40349 - protein, 9 aa, synthetic construct
LKAAYRAYQ

SEQ ID NO: 40350 - protein, 9 aa, synthetic construct
IESLIDRDY

SEQ ID NO: 40351 - protein, 9 aa, synthetic construct
LGENIADNG

SEQ ID NO: 40352 - protein, 9 aa, synthetic construct
IIVNRNREE

SEQ ID NO: 40353 - protein, 9 aa, synthetic construct
ISSVDRILT

SEQ ID NO: 40354 - protein, 9 aa, synthetic construct
LLPEAKHPG

SEQ ID NO: 40355 - protein, 9 aa, synthetic construct
VLPDGRVTN

SEQ ID NO: 40356 - protein, 9 aa, synthetic construct
WTGHNVTVV

SEQ ID NO: 40357 - protein, 9 aa, synthetic construct
FKPKTRTPE

SEQ ID NO: 40358 - protein, 9 aa, synthetic construct
IAKINVGKR

SEQ ID NO: 40359 - protein, 9 aa, synthetic construct
VTVVQRTNT

SEQ ID NO: 40360 - protein, 9 aa, synthetic construct
FSPNGTELL

SEQ ID NO: 40361 - protein, 9 aa, synthetic construct
FTEHQKIHT

SEQ ID NO: 40362 - protein, 9 aa, synthetic construct
LVSKGTLVQ

SEQ ID NO: 40363 - protein, 9 aa, synthetic construct
ISLMDKLLR

SEQ ID NO: 40364 - protein, 9 aa, synthetic construct
IKLGLKSLV

SEQ ID NO: 40365 - protein, 9 aa, synthetic construct
LFHNFPSIV

SEQ ID NO: 40366 - protein, 9 aa, synthetic construct
IIRALNLAH

SEQ ID NO: 40367 - protein, 9 aa, synthetic construct
ISRDGRLRS

SEQ ID NO: 40368 - protein, 9 aa, synthetic construct
LKRSSPRTI

SEQ ID NO: 40369 - protein, 9 aa, synthetic construct
IIIVNRNRE

SEQ ID NO: 40370 - protein, 9 aa, synthetic construct
FRMKPKKEN

SEQ ID NO: 40371 - protein, 9 aa, synthetic construct
WKVVKTSVQ

SEQ ID NO: 40372 - protein, 9 aa, synthetic construct
YGAVIKRLS

SEQ ID NO: 40373 - protein, 9 aa, synthetic construct
LLKSKSNGR

SEQ ID NO: 40374 - protein, 9 aa, synthetic construct
FAMAGHENL

SEQ ID NO: 40375 - protein, 9 aa, synthetic construct
VEAAGPPRA

SEQ ID NO: 40376 - protein, 9 aa, synthetic construct
VAHANRVRV

SEQ ID NO: 40377 - protein, 9 aa, synthetic construct
IFRDRTDIQ

SEQ ID NO: 40378 - protein, 9 aa, synthetic construct
VSPNEKHLF

SEQ ID NO: 40379 - protein, 9 aa, synthetic construct
VEKSTSVTY

SEQ ID NO: 40380 - protein, 9 aa, synthetic construct
FGQVPKQLF

SEQ ID NO: 40381 - protein, 9 aa, synthetic construct
IQVLPDGRV

SEQ ID NO: 40382 - protein, 9 aa, synthetic construct
YTLEQALLS

SEQ ID NO: 40383 - protein, 9 aa, synthetic construct
VTSNSGILG

SEQ ID NO: 40384 - protein, 9 aa, synthetic construct
YTPYTKPDA

SEQ ID NO: 40385 - protein, 9 aa, synthetic construct
WMLAGRPHP

SEQ ID NO: 40386 - protein, 9 aa, synthetic construct
VKYSKSQAI

SEQ ID NO: 40387 - protein, 9 aa, synthetic construct
ISFRMKPKK

SEQ ID NO: 40388 - protein, 9 aa, synthetic construct
LLVFPPAFY

SEQ ID NO: 40389 - protein, 9 aa, synthetic construct
YSAMRDQYM

SEQ ID NO: 40390 - protein, 9 aa, synthetic construct
LLPHAGYAR

SEQ ID NO: 40391 - protein, 9 aa, synthetic construct
VFMWTAELE

SEQ ID NO: 40392 - protein, 9 aa, synthetic construct
VISYLSLTC

SEQ ID NO: 40393 - protein, 9 aa, synthetic construct
VVSLSSADA

SEQ ID NO: 40394 - protein, 9 aa, synthetic construct
IKSYDLDPG

SEQ ID NO: 40395 - protein, 9 aa, synthetic construct
VMRFSCEAG

SEQ ID NO: 40396 - protein, 9 aa, synthetic construct
IRTFKESPK

SEQ ID NO: 40397 - protein, 9 aa, synthetic construct
SVQWCAPIV

SEQ ID NO: 40398 - protein, 9 aa, synthetic construct
IKVLLNVIQ

SEQ ID NO: 40399 - protein, 9 aa, synthetic construct
MVQFVGREA

SEQ ID NO: 40400 - protein, 9 aa, synthetic construct
LSGYTPYTK

SEQ ID NO: 40401 - protein, 9 aa, synthetic construct
VNVLAAKIA

SEQ ID NO: 40402 - protein, 9 aa, synthetic construct
FQIYEALRP

SEQ ID NO: 40403 - protein, 9 aa, synthetic construct
VVSITDVDF

SEQ ID NO: 40404 - protein, 9 aa, synthetic construct
FHYFLGGTR

SEQ ID NO: 40405 - protein, 9 aa, synthetic construct
ILGFVSNFG

SEQ ID NO: 40406 - protein, 9 aa, synthetic construct
VSTLNTHKA

SEQ ID NO: 40407 - protein, 9 aa, synthetic construct
LNVIQDLEK

SEQ ID NO: 40408 - protein, 9 aa, synthetic construct
LYAVGGYDG

SEQ ID NO: 40409 - protein, 9 aa, synthetic construct
LDQEDALLG

SEQ ID NO: 40410 - protein, 9 aa, synthetic construct
DFIYQNEFL

SEQ ID NO: 40411 - protein, 9 aa, synthetic construct
ISLVLNSGS

SEQ ID NO: 40412 - protein, 9 aa, synthetic construct
ILVAIGFKT

SEQ ID NO: 40413 - protein, 9 aa, synthetic construct
LQMQEGVRS

SEQ ID NO: 40414 - protein, 9 aa, synthetic construct
LGSYPVDDG

SEQ ID NO: 40415 - protein, 9 aa, synthetic construct
LVNMGGEQV

SEQ ID NO: 40416 - protein, 9 aa, synthetic construct
TLQFKAQDL

SEQ ID NO: 40417 - protein, 9 aa, synthetic construct
MFFYVTLAG

SEQ ID NO: 40418 - protein, 9 aa, synthetic construct
HEEYISLVL

SEQ ID NO: 40419 - protein, 9 aa, synthetic construct
PTYISSVLQ

SEQ ID NO: 40420 - protein, 9 aa, synthetic construct
IISLMDKLL

SEQ ID NO: 40421 - protein, 9 aa, synthetic construct
VILYEALFG

SEQ ID NO: 40422 - protein, 9 aa, synthetic construct
IQCLIPCAI

SEQ ID NO: 40423 - protein, 9 aa, synthetic construct
IDWVKGRKI

SEQ ID NO: 40424 - protein, 9 aa, synthetic construct
ILQIISLMD

SEQ ID NO: 40425 - protein, 9 aa, synthetic construct
IHGFSVLES

SEQ ID NO: 40426 - protein, 9 aa, synthetic construct
IELFHTMGR

SEQ ID NO: 40427 - protein, 9 aa, synthetic construct
LQSYQAEII

SEQ ID NO: 40428 - protein, 9 aa, synthetic construct
LAHLIDGIL

SEQ ID NO: 40429 - protein, 9 aa, synthetic construct
FIYQNEFLG

SEQ ID NO: 40430 - protein, 9 aa, synthetic construct
LMILVAIGF

SEQ ID NO: 40431 - protein, 9 aa, synthetic construct
ANKWTGHNV

SEQ ID NO: 40432 - protein, 9 aa, synthetic construct
LNTHKAIHA

SEQ ID NO: 40433 - protein, 9 aa, synthetic construct
WAIIKSYDL

SEQ ID NO: 40434 - protein, 9 aa, synthetic construct
KKIAKINVG

SEQ ID NO: 40435 - protein, 9 aa, synthetic construct
LSGSQLAPE

SEQ ID NO: 40436 - protein, 9 aa, synthetic construct
LHPAAPGAP

SEQ ID NO: 40437 - protein, 9 aa, synthetic construct
PLPGKVKYS

SEQ ID NO: 40438 - protein, 9 aa, synthetic construct
LMYSTVSGS

SEQ ID NO: 40439 - protein, 9 aa, synthetic construct
HQGTKMIPC

SEQ ID NO: 40440 - protein, 9 aa, synthetic construct
TYSSSLKRS

SEQ ID NO: 40441 - protein, 9 aa, synthetic construct
TSASFVNKQ

SEQ ID NO: 40442 - protein, 9 aa, synthetic construct
PTMAIIRAL

SEQ ID NO: 40443 - protein, 9 aa, synthetic construct
LGGTRLHPA

SEQ ID NO: 40444 - protein, 9 aa, synthetic construct
SEASDIWAM

SEQ ID NO: 40445 - protein, 9 aa, synthetic construct
QRHHSVEAA

SEQ ID NO: 40446 - protein, 9 aa, synthetic construct
EVLAALLKS

SEQ ID NO: 40447 - protein, 9 aa, synthetic construct
QWCAPIVPA

SEQ ID NO: 40448 - protein, 9 aa, synthetic construct
NSTATLEPP

SEQ ID NO: 40449 - protein, 9 aa, synthetic construct
SQEIEMHAD

SEQ ID NO: 40450 - protein, 9 aa, synthetic construct
LQAAELIDS

SEQ ID NO: 40451 - protein, 9 aa, synthetic construct
SAGGSPARS

SEQ ID NO: 40452 - protein, 9 aa, synthetic construct
NFPSIVLPN

SEQ ID NO: 40453 - protein, 9 aa, synthetic construct
EEYSAMRDQ

SEQ ID NO: 40454 - protein, 9 aa, synthetic construct
ILGSAVGGG

SEQ ID NO: 40455 - protein, 9 aa, synthetic construct
AAHALSRRG

SEQ ID NO: 40456 - protein, 9 aa, synthetic construct
QAESMMVPG

SEQ ID NO: 40457 - protein, 9 aa, synthetic construct
NEAVFMWTA

SEQ ID NO: 40458 - protein, 9 aa, synthetic construct
LDPAKTLAE

SEQ ID NO: 40459 - protein, 9 aa, synthetic construct
GRGAEASAA

SEQ ID NO: 40460 - protein, 9 aa, synthetic construct
TGNVNVLAA

SEQ ID NO: 40461 - protein, 9 aa, synthetic construct
EAGHVLRGS

SEQ ID NO: 40462 - protein, 9 aa, synthetic construct
GNAAGVAKQ

SEQ ID NO: 40463 - protein, 9 aa, synthetic construct
SSNAAILGG

SEQ ID NO: 40464 - protein, 9 aa, synthetic construct
YTPTIVPSS

SEQ ID NO: 40465 - protein, 9 aa, synthetic construct
IVPATQEAN

SEQ ID NO: 40466 - protein, 9 aa, synthetic construct
ALPTMTARQ

SEQ ID NO: 40467 - protein, 9 aa, synthetic construct
PNGTELLVN

SEQ ID NO: 40468 - protein, 9 aa, synthetic construct
HNVTVVQRT

SEQ ID NO: 40469 - protein, 9 aa, synthetic construct
SKGTLVQTK

SEQ ID NO: 40470 - protein, 9 aa, synthetic construct
ILQAVVSLS

SEQ ID NO: 40471 - protein, 9 aa, synthetic construct
VKGRKISSV

SEQ ID NO: 40472 - protein, 9 aa, synthetic construct
NVTVVQRTN

SEQ ID NO: 40473 - protein, 9 aa, synthetic construct
NSGSGLSHD

SEQ ID NO: 40474 - protein, 9 aa, synthetic construct
PRASTIFLS

SEQ ID NO: 40475 - protein, 9 aa, synthetic construct
CEAGHVLRG

SEQ ID NO: 40476 - protein, 9 aa, synthetic construct
SKIIIVNRN

SEQ ID NO: 40477 - protein, 9 aa, synthetic construct
QEGVRSGFA

SEQ ID NO: 40478 - protein, 9 aa, synthetic construct
VSSSEQLQS

SEQ ID NO: 40479 - protein, 9 aa, synthetic construct
KISSVDRIL

SEQ ID NO: 40480 - protein, 9 aa, synthetic construct
AGGSGSSSS

SEQ ID NO: 40481 - protein, 9 aa, synthetic construct
LHTLIIAEA

SEQ ID NO: 40482 - protein, 9 aa, synthetic construct
EAAGPPRAS

SEQ ID NO: 40483 - protein, 9 aa, synthetic construct
AHANRVRVG

SEQ ID NO: 40484 - protein, 9 aa, synthetic construct
YISSVLQAN

SEQ ID NO: 40485 - protein, 9 aa, synthetic construct
NYITELRRQ

SEQ ID NO: 40486 - protein, 9 aa, synthetic construct
PSSASAYVS

SEQ ID NO: 40487 - protein, 9 aa, synthetic construct
VVSSSEQLQ

SEQ ID NO: 40488 - protein, 9 aa, synthetic construct
SYQAEIIEL

SEQ ID NO: 40489 - protein, 9 aa, synthetic construct
SNAAILGGQ

SEQ ID NO: 40490 - protein, 9 aa, synthetic construct
SSGSGSSSS

SEQ ID NO: 40491 - protein, 9 aa, synthetic construct
ITSSVEHDS

SEQ ID NO: 40492 - protein, 9 aa, synthetic construct
NIATLCFKA

SEQ ID NO: 40493 - protein, 9 aa, synthetic construct
AEDSRIRLT

SEQ ID NO: 40494 - protein, 9 aa, synthetic construct
VMSAPPVRA

SEQ ID NO: 40495 - protein, 9 aa, synthetic construct
CAPIVPATQ

SEQ ID NO: 40496 - protein, 9 aa, synthetic construct
VRSGFAMAG

SEQ ID NO: 40497 - protein, 9 aa, synthetic construct
LQLAIIRER

SEQ ID NO: 40498 - protein, 9 aa, synthetic construct
VSEASDIWA

SEQ ID NO: 40499 - protein, 9 aa, synthetic construct
QSGDPDPGA

SEQ ID NO: 40500 - protein, 9 aa, synthetic construct
FITSSVEHD

SEQ ID NO: 40501 - protein, 9 aa, synthetic construct
DGRVTNIPQ

SEQ ID NO: 40502 - protein, 9 aa, synthetic construct
ATMAYDRYV

SEQ ID NO: 40503 - protein, 9 aa, synthetic construct
HVIARDFGQ

SEQ ID NO: 40504 - protein, 9 aa, synthetic construct
FLGCTDRLV

SEQ ID NO: 40505 - protein, 9 aa, synthetic construct
QGMVTDQFG

SEQ ID NO: 40506 - protein, 9 aa, synthetic construct
TTGITDPPP

SEQ ID NO: 40507 - protein, 9 aa, synthetic construct
LSASQEIEM

SEQ ID NO: 40508 - protein, 9 aa, synthetic construct
LLDILDTAG

SEQ ID NO: 40509 - protein, 9 aa, synthetic construct
WSPAEDSRI

SEQ ID NO: 40510 - protein, 9 aa, synthetic construct
AEAFEDDTG

SEQ ID NO: 40511 - protein, 9 aa, synthetic construct
LNMEFNPSD

SEQ ID NO: 40512 - protein, 9 aa, synthetic construct
YTPTSASFV

SEQ ID NO: 40513 - protein, 9 aa, synthetic construct
RKISSVDRI

SEQ ID NO: 40514 - protein, 9 aa, synthetic construct
MFTMYDLDE

SEQ ID NO: 40515 - protein, 9 aa, synthetic construct
QVYLFDLTY

SEQ ID NO: 40516 - protein, 9 aa, synthetic construct
SLSSADARQ

SEQ ID NO: 40517 - protein, 9 aa, synthetic construct
HTLIIAEAF

SEQ ID NO: 40518 - protein, 9 aa, synthetic construct
ARPWSPAED

SEQ ID NO: 40519 - protein, 9 aa, synthetic construct
IIKSYDLDP

SEQ ID NO: 40520 - protein, 9 aa, synthetic construct
FTTLADYLH

SEQ ID NO: 40521 - protein, 9 aa, synthetic construct
LIIAEAFED

SEQ ID NO: 40522 - protein, 9 aa, synthetic construct
HQYIFSHIL

SEQ ID NO: 40523 - protein, 9 aa, synthetic construct
NKQVVSSSE

SEQ ID NO: 40524 - protein, 9 aa, synthetic construct
VASSSSESE

SEQ ID NO: 40525 - protein, 8 aa, synthetic construct
DNMLRGTE

SEQ ID NO: 40526 - protein, 9 aa, synthetic construct
HYFEESFKA

SEQ ID NO: 40527 - protein, 8 aa, synthetic construct
YFEESFKA

SEQ ID NO: 40528 - protein, 9 aa, synthetic construct
LAIDTEERL

SEQ ID NO: 40529 - protein, 9 aa, synthetic construct
VLRDNIQGI

SEQ ID NO: 40530 - protein, 9 aa, synthetic construct
FTPYSAAFL

SEQ ID NO: 40531 - protein, 9 aa, synthetic construct
VQEHYNYTK

SEQ ID NO: 40532 - protein, 9 aa, synthetic construct
TRSLSDFTG

SEQ ID NO: 40533 - protein, 9 aa, synthetic construct
YITVGDKYV

SEQ ID NO: 40534 - protein, 8 aa, synthetic construct
LLSPPVKV

SEQ ID NO: 40535 - protein, 9 aa, synthetic construct
ELLSPPVKV

SEQ ID NO: 40536 - protein, 9 aa, synthetic construct
SLLGWIWYT

SEQ ID NO: 40537 - protein, 9 aa, synthetic construct
TLLSPPVKV

SEQ ID NO: 40538 - protein, 9 aa, synthetic construct
SLLDRVLYL

SEQ ID NO: 40539 - protein, 9 aa, synthetic construct
ILWTGNIEI

SEQ ID NO: 40540 - protein, 9 aa, synthetic construct
RLFRVASKR

SEQ ID NO: 40541 - protein, 9 aa, synthetic construct
SLGKQIKLK

SEQ ID NO: 40542 - protein, 9 aa, synthetic construct
ISLQNPRYK

SEQ ID NO: 40543 - protein, 9 aa, synthetic construct
ALTSGKQIK

SEQ ID NO: 40544 - protein, 9 aa, synthetic construct
SILQNPRYK

SEQ ID NO: 40545 - protein, 9 aa, synthetic construct
LLLSPPVKK

SEQ ID NO: 40546 - protein, 9 aa, synthetic construct
SLLQSRVLY

SEQ ID NO: 40547 - protein, 9 aa, synthetic construct
VLLEGKFEK

SEQ ID NO: 40548 - protein, 9 aa, synthetic construct
VLLENGKFE

SEQ ID NO: 40549 - protein, 9 aa, synthetic construct
LLNYGKFEK

SEQ ID NO: 40550 - protein, 8 aa, synthetic construct
RLQNPRYK

SEQ ID NO: 40551 - protein, 9 aa, synthetic construct
TLLPPVKVK

SEQ ID NO: 40552 - protein, 8 aa, synthetic construct
SPSSSSPS

SEQ ID NO: 40553 - protein, 9 aa, synthetic construct
SPRSSPSSS

SEQ ID NO: 40554 - protein, 9 aa, synthetic construct
SPRSPSSSS

SEQ ID NO: 40555 - protein, 9 aa, synthetic construct
RVASGRGGL

SEQ ID NO: 40556 - protein, 9 aa, synthetic construct
SPSPRSSSS

SEQ ID NO: 40557 - protein, 8 aa, synthetic construct
SPRSSSPS

SEQ ID NO: 40558 - protein, 9 aa, synthetic construct
SASTRHATL

SEQ ID NO: 40559 - protein, 9 aa, synthetic construct
SPSSPSSSG

SEQ ID NO: 40560 - protein, 9 aa, synthetic construct
SPSSSPSSS

SEQ ID NO: 40561 - protein, 8 aa, synthetic construct
STRHATPL

SEQ ID NO: 40562 - protein, 9 aa, synthetic construct
SSAPNSPRT

SEQ ID NO: 40563 - protein, 9 aa, synthetic construct
IPSETESTA

SEQ ID NO: 40564 - protein, 8 aa, synthetic construct
SGKTPETL

SEQ ID NO: 40565 - protein, 8 aa, synthetic construct
LSQVQRIL

SEQ ID NO: 40566 - protein, 9 aa, synthetic construct
MALQSDRVL

SEQ ID NO: 40567 - protein, 8 aa, synthetic construct
AADWGNNF

SEQ ID NO: 40568 - protein, 8 aa, synthetic construct
NFQHYPEL

SEQ ID NO: 40569 - protein, 8 aa, synthetic construct
QRILRERF

SEQ ID NO: 40570 - protein, 8 aa, synthetic construct
SRLQNPRY

SEQ ID NO: 40571 - protein, 9 aa, synthetic construct
FRVASKGRG

SEQ ID NO: 40572 - protein, 9 aa, synthetic construct
LLQSDRVLY

SEQ ID NO: 40573 - protein, 9 aa, synthetic construct
VLASGGLRI

SEQ ID NO: 40574 - protein, 9 aa, synthetic construct
LWYTGNIEI

SEQ ID NO: 40575 - protein, 9 aa, synthetic construct
LQSDRVLYL

SEQ ID NO: 40576 - protein, 9 aa, synthetic construct
ISRLQNPRY

SEQ ID NO: 40577 - protein, 9 aa, synthetic construct
YKVLASGGL

SEQ ID NO: 40578 - protein, 9 aa, synthetic construct
LFRVASKGR

SEQ ID NO: 40579 - protein, 9 aa, synthetic construct
ILWYTGNIE

SEQ ID NO: 40580 - protein, 9 aa, synthetic construct
LGNLRGYGM

SEQ ID NO: 40581 - protein, 9 aa, synthetic construct
PRGSEVHTT

SEQ ID NO: 40582 - protein, 9 aa, synthetic construct
HYGQPDRQG

SEQ ID NO: 40583 - protein, 9 aa, synthetic construct
NPRYKVLAS

SEQ ID NO: 40584 - protein, 9 aa, synthetic construct
FHYGQPDRQ

SEQ ID NO: 40585 - protein, 9 aa, synthetic construct
VNGAADWGN

SEQ ID NO: 40586 - protein, 9 aa, synthetic construct
SSSTSSPSS

SEQ ID NO: 40587 - protein, 9 aa, synthetic construct
EVHTTSADA

SEQ ID NO: 40588 - protein, 9 aa, synthetic construct
ISISRLQNP

SEQ ID NO: 40589 - protein, 9 aa, synthetic construct
VVFESDGPR

SEQ ID NO: 40590 - protein, 9 aa, synthetic construct
DAISISRLQ

SEQ ID NO: 40591 - protein, 9 aa, synthetic construct
SSSSTSSPS

SEQ ID NO: 40592 - protein, 9 aa, synthetic construct
SSSSSSSPS

SEQ ID NO: 40593 - protein, 9 aa, synthetic construct
HYGQPDRQG

SEQ ID NO: 40594 - protein, 29 aa, synthetic construct
EANYLLSVSWGYIKFKRMLNRELTHLSEM

SEQ ID NO: 40595 - protein, 29 aa, synthetic construct
QELAIYKQTESDYSYYNLILKKAGQFLDN

SEQ ID NO: 40596 - protein, 29 aa, synthetic construct
ALLGIPKVLYKSKTGKYSFPHTYIRAVHA

SEQ ID NO: 40597 - protein, 29 aa, synthetic construct
DLSQLSEEERRQIAAVMSRAQGLPKGSVP

SEQ ID NO: 40598 - protein, 29 aa, synthetic construct
ESDEEQPRFQSAASRAQILDKATEYIQYM

SEQ ID NO: 40599 - protein, 29 aa, synthetic construct
TKREVPKEDGVGDVQHFDSSKIMEEHSYI

SEQ ID NO: 40600 - protein, 29 aa, synthetic construct
YVQGNKRAHGQDLGTAGSCLRRFSTMPFM

SEQ ID NO: 40601 - protein, 29 aa, synthetic construct
LRDSVPSLQGEKASRAQILDKATEYIQYM

SEQ ID NO: 40602 - protein, 27 aa, synthetic construct
MDLEKNYPTPRTSRTGHGGVNQLGGVF

SEQ ID NO: 40603 - protein, 29 aa, synthetic construct
ENSYQCEECGKAFKWFSTLTRHKRIHTGE

SEQ ID NO: 40604 - protein, 29 aa, synthetic construct
GTNRIEVGNLDGSMRKVLVWQNLDSPRAI

SEQ ID NO: 40605 - protein, 29 aa, synthetic construct
PQHPGDHRIRDGDFVVLKREDVFKAVQVQ

SEQ ID NO: 40606 - protein, 29 aa, synthetic construct
YDGDSIYAPLIAVLSGLIVPEIRGNETVP

SEQ ID NO: 40607 - protein, 29 aa, synthetic construct
AKKTGSISFDFRTTEPNGLILFSHGKPRH

SEQ ID NO: 40608 - protein, 29 aa, synthetic construct
LQTRHSVSEMASNKFKRMLNRELTHLSEM

SEQ ID NO: 40609 - protein, 29 aa, synthetic construct
GTGAQPLWGVRSGSGHRQLLSVAATPAAL

SEQ ID NO: 40610 - protein, 29 aa, synthetic construct
PGAEGEYALRLPRIPPPLPKPASRTASTG

SEQ ID NO: 40611 - protein, 29 aa, synthetic construct
FIEKSVVGSGSWQRVNAQTAVRSPRYAVF

SEQ ID NO: 40612 - protein, 29 aa, synthetic construct
FANDRENYDIIKTYHYLYLAMLERFQDGD

SEQ ID NO: 40613 - protein, 29 aa, synthetic construct
FLVQMRRQHRRGTKGGVSYRPAEVAETGA

SEQ ID NO: 40614 - protein, 29 aa, synthetic construct
DGCVAYAYGLKTADGKGEKRASELAKHPM

SEQ ID NO: 40615 - protein, 29 aa, synthetic construct
GFFKAEEVIIADFCFLRIRTKGGNSAILN

SEQ ID NO: 40616 - protein, 29 aa, synthetic construct
NVRSLLVLNSTSFLYYPDPVLEPLSPTGL

SEQ ID NO: 40617 - protein, 29 aa, synthetic construct
RGASLGPPPYLRTEFHQHQHQHQHTHQHT

SEQ ID NO: 40618 - protein, 29 aa, synthetic construct
NSVSAVSIEEGAFRDSNYLRLLFLSRNHL

SEQ ID NO: 40619 - protein, 29 aa, synthetic construct
VAGPNGSWKCTVCDKIAQLRIITGEWFFE

SEQ ID NO: 40620 - protein, 29 aa, synthetic construct
TVEEDNDSGGFDALDLDDDSHERYSFGPS

SEQ ID NO: 40621 - protein, 17 aa, synthetic construct
MADVSLHRNPATLKLWN

SEQ ID NO: 40622 - protein, 29 aa, synthetic construct
ALQALKGSQDSSENDLVRSPKSAGSRTSS

SEQ ID NO: 40623 - protein, 29 aa, synthetic construct
PVPPQPQPPPAPAPQPVQSHPPIIAATPQ

SEQ ID NO: 40624 - protein, 29 aa, synthetic construct
ENLPSLAPPPLQTASAPLTTPPLENLPSL

SEQ ID NO: 40625 - protein, 29 aa, synthetic construct
NKPRPPPLSPLGGPVPSALPNGPPSPRSG

SEQ ID NO: 40626 - protein, 29 aa, synthetic construct
LENLPSLAPPPLQTASAPLTTPPLENLPS

SEQ ID NO: 40627 - protein, 29 aa, synthetic construct
KGKLGVPGLPGYPGRPGPKGSIGFPGPLG

SEQ ID NO: 40628 - protein, 29 aa, synthetic construct
MMQRPLGSSTAFSIDSLIGSPPQPSPGHF

SEQ ID NO: 40629 - protein, 23 aa, synthetic construct
MAAPIPQGFSCLSRFLGWWFRQP

SEQ ID NO: 40630 - protein, 29 aa, synthetic construct
HANISMDIDTFTSLNPLELQSLDVGNVTA

SEQ ID NO: 40631 - protein, 29 aa, synthetic construct
AVLYQDPHAGPLWVRGSLVLFGSCTFCLN

SEQ ID NO: 40632 - protein, 29 aa, synthetic construct
VTLRGAPSGHPLSAVSFAYAAGAGQLRAA

SEQ ID NO: 40633 - protein, 21 aa, synthetic construct
GQRGPGTHMSEPPHNNMQVYA

SEQ ID NO: 40634 - protein, 29 aa, synthetic construct
VPEALSPAFSEDSESHGSSSASSPLSAEG

SEQ ID NO: 40635 - protein, 29 aa, synthetic construct
VRHPNYLGDLIMALAWSLPCGFNHILPYF

SEQ ID NO: 40636 - protein, 29 aa, synthetic construct
ENPYTSGIIASKDTAPSIIVASGNIGSEL

SEQ ID NO: 40637 - protein, 29 aa, synthetic construct
ELSLLADEVITVFSVVGMDSDWLMGERGN

SEQ ID NO: 40638 - protein, 29 aa, synthetic construct
IPRFMLLESGGLQIAPVFIQDAGNYTCYA

SEQ ID NO: 40639 - protein, 29 aa, synthetic construct
QKGASSTWMKAIVSSGTLGDRMAAMILLI

SEQ ID NO: 40640 - protein, 29 aa, synthetic construct
PGTEPTGTSEPLGTGTVSAELSSPWAARD

SEQ ID NO: 40641 - protein, 26 aa, synthetic construct
KLTLTCKHQLVRDSCKASCNCSNSIY

SEQ ID NO: 40642 - protein, 29 aa, synthetic construct
PTPCQLQSEQAFLRTVQALLSNSSMLPTL

SEQ ID NO: 40643 - protein, 29 aa, synthetic construct
DDFPAPSDGYYRGEGTQDEEEGGASSDAT

SEQ ID NO: 40644 - protein, 29 aa, synthetic construct
HIHHRQKRSVSIERFVETLVVADKMMVGY

SEQ ID NO: 40645 - protein, 29 aa, synthetic construct
QQEEEAQLEEIEETGGEGLQEEGVQLEEV

SEQ ID NO: 40646 - protein, 29 aa, synthetic construct
TTRFGSGAAGGSGSSSSNSSGDALVTRIS

SEQ ID NO: 40647 - protein, 29 aa, synthetic construct
VEDIWIPREDKNNFLIDTASESEYSTVEE

SEQ ID NO: 40648 - protein, 29 aa, synthetic construct
VSMPLVEERHRILNETGKILLEKFGGSFL

SEQ ID NO: 40649 - protein, 29 aa, synthetic construct
KDQASFLSDSNMFINLPRVKELLEDDKEK

SEQ ID NO: 40650 - protein, 29 aa, synthetic construct
LGPQQIKDLLLAALEGLKGSSEAPGKDSR

SEQ ID NO: 40651 - protein, 27 aa, synthetic construct
MPLVEERHRILNETGKILLEKFGGSFL

SEQ ID NO: 40652 - protein, 29 aa, synthetic construct
NSSREKIVIPVFNLFVKDIYFLHKIHTNH

SEQ ID NO: 40653 - protein, 29 aa, synthetic construct
TSDSPALVGSNITFAVNLIFPRCQKEDAN

SEQ ID NO: 40654 - protein, 29 aa, synthetic construct
QVEVLVEYPLRCLVLVAQVVAEMWRRNGL

SEQ ID NO: 40655 - protein, 29 aa, synthetic construct
GSGPFSEIVLSAPEGLPTTPAAPGLPPTE

SEQ ID NO: 40656 - protein, 29 aa, synthetic construct
SLPAFGPDTQSELPTSFAVITEDATLSPE

SEQ ID NO: 40657 - protein, 29 aa, synthetic construct
LALLFNMLRHLEQPQQQLSPEIKGGVSLC

SEQ ID NO: 40658 - protein, 29 aa, synthetic construct
YMLAMGQDVDLHTIHFHAESFLYRNGENY

SEQ ID NO: 40659 - protein, 29 aa, synthetic construct
ALYVRDTLQPGMRVRMLDDYEEISAGDEG

SEQ ID NO: 40660 - protein, 29 aa, synthetic construct
TDVRQVFEYDLISQFMQGYPSKVHILPRP

SEQ ID NO: 40661 - protein, 29 aa, synthetic construct
LIALRIEKNELSRITPGAFRNLGSLRYLS

SEQ ID NO: 40662 - protein, 29 aa, synthetic construct
GICGREYGLGDRWFLRVEDRQDLNRQRIQ

SEQ ID NO: 40663 - protein, 29 aa, synthetic construct
KRKTGRQVNCQMRVKKTMPFFLEGKPKAT

SEQ ID NO: 40664 - protein, 29 aa, synthetic construct
HFLGMRVQSELEHLSELRREAGKDRSSVH

SEQ ID NO: 40665 - protein, 29 aa, synthetic construct
AAMYRGPVYALHDVSDKIPMTNSPILDPL

SEQ ID NO: 40666 - protein, 29 aa, synthetic construct
SAKPFTIDVDKKLEEGQKNIRLLRTELQK

SEQ ID NO: 40667 - protein, 29 aa, synthetic construct
PIRRKRSIEEAVPAVCKTRTVIYEIPRSQ

SEQ ID NO: 40668 - protein, 29 aa, synthetic construct
PVLDSDGSFFLYSKLTVDKSRWQQGNVFS

SEQ ID NO: 40669 - protein, 29 aa, synthetic construct
ESSRSPDPTPPALDQETSSLLRCTSPWCL

SEQ ID NO: 40670 - protein, 29 aa, synthetic construct
QKDSIKLDDDSERKVVKMILKLLEDKNGE

SEQ ID NO: 40671 - protein, 29 aa, synthetic construct
DSGGSKTFSAKDYMARTPHWALFGASERG

SEQ ID NO: 40672 - protein, 29 aa, synthetic construct
PRGLASGRLPLAVHSAQHGPGSGAPWLRI

SEQ ID NO: 40673 - protein, 29 aa, synthetic construct
SAETNELREALLKIFPDSEQRLKIDQILV

SEQ ID NO: 40674 - protein, 29 aa, synthetic construct
YLGSCLLLLGGFSLALSFAPWCDERCRRR

SEQ ID NO: 40675 - protein, 29 aa, synthetic construct
TGAVKLAKGTVQTGMDTTKTVLTGTKDAV

SEQ ID NO: 40676 - protein, 29 aa, synthetic construct
LTGAVKLAKGTVQTGMDTTKTVLTGTKDA

SEQ ID NO: 40677 - protein, 29 aa, synthetic construct
YFTLAMENIKSSRGLMGNIIIELYEVAGI

SEQ ID NO: 40678 - protein, 29 aa, synthetic construct
KPEKTKAVENYLIQMARYGQLSEKVSLDS

SEQ ID NO: 40679 - protein, 29 aa, synthetic construct
FSELFGPHQQGLPPPYPLSQLPPGPSLGG

SEQ ID NO: 40680 - protein, 29 aa, synthetic construct
RAHAEERLLKKLFSGYNKWSRPVANISDV

SEQ ID NO: 40681 - protein, 29 aa, synthetic construct
AEFQWFKEETRLATGLDGMRIENKGRMST

SEQ ID NO: 40682 - protein, 29 aa, synthetic construct
QGSFGMVYEGNARDIIKGEAETRVAVKTV

SEQ ID NO: 40683 - protein, 29 aa, synthetic construct
WILRLPPGSNGEVPKVPVTFDDVAVHFSE

SEQ ID NO: 40684 - protein, 29 aa, synthetic construct
TCFVFSDVDLIPMNDHNAYRCFSQPRHIS

SEQ ID NO: 40685 - protein, 29 aa, synthetic construct
PSLLSKRKKVKMKREKASSSGKRQSSRTV

SEQ ID NO: 40686 - protein, 29 aa, synthetic construct
LERNKFYSFALDKTITPDTKALLERAKSL

SEQ ID NO: 40687 - protein, 25 aa, synthetic construct
ARSQTHTQRGMGLGFTSSMRGMDAV

SEQ ID NO: 40688 - protein, 29 aa, synthetic construct
KTFNWSSTLTNHRKIYTEEKPYKCEEYNK

SEQ ID NO: 40689 - protein, 29 aa, synthetic construct
VEPMKKVKSRKLTLPHSKSCDSLAVSQAC

SEQ ID NO: 40690 - protein, 29 aa, synthetic construct
SLGKLVSCGCGWKGSGKLPGTSRHECEST

SEQ ID NO: 40691 - protein, 29 aa, synthetic construct
SRNIYSADYYKANENDAIPIRWMPPESIF

SEQ ID NO: 40692 - protein, 29 aa, synthetic construct
AASCMCPSKCQSAAPSQLDKPRLNRAPKR

SEQ ID NO: 40693 - protein, 21 aa, synthetic construct
LDDVNEIIRKEFSGPPARNQT

SEQ ID NO: 40694 - protein, 29 aa, synthetic construct
LVMPPSTQAVSFQPETDNRANFSSDRAFH

SEQ ID NO: 40695 - protein, 29 aa, synthetic construct
VLEREYFKGEFPPYPKPGEISNDPITFNT

SEQ ID NO: 40696 - protein, 29 aa, synthetic construct
IMSKNAYVPMAVGSWFAGIVNSAVQTTFV

SEQ ID NO: 40697 - protein, 29 aa, synthetic construct
KPEKTKAVENYLIQMARYGQLSEKVSEQG

SEQ ID NO: 40698 - protein, 29 aa, synthetic construct
LNGRLPDLINDALHRSGQIERGCEGPSTT

SEQ ID NO: 40699 - protein, 29 aa, synthetic construct
SKGNNVFVVHKPSAVPSREGSESGPGPSS

SEQ ID NO: 40700 - protein, 29 aa, synthetic construct
SYEPSHDGDLGFEKGEQLRILEQSGEWWK

SEQ ID NO: 40701 - protein, 29 aa, synthetic construct
CKECGKAFSNSSHLIGHGRIHSGEKPYVC

SEQ ID NO: 40702 - protein, 29 aa, synthetic construct
RLAHYNKRSTITSREIQTAVRLLLPGELA

SEQ ID NO: 40703 - protein, 29 aa, synthetic construct
QTRGLQTGPVPPGRLAGPPAVATSAAAAA

SEQ ID NO: 40704 - protein, 29 aa, synthetic construct
DVQTWQESKMACAAQNASLLKINNKNALE

SEQ ID NO: 40705 - protein, 29 aa, synthetic construct
AALVTSNSTHPKGKSYNFNKFGENKYDKS

SEQ ID NO: 40706 - protein, 29 aa, synthetic construct
PQRPVHGLGVPLHSATPLPRRPQPRQDLG

SEQ ID NO: 40707 - protein, 29 aa, synthetic construct
TKRPAPARPTMPPPQVSGSRSSPPAPPLP

SEQ ID NO: 40708 - protein, 29 aa, synthetic construct
MFILLRPEDNIRLAVRLESTYQNRTRYMV

SEQ ID NO: 40709 - protein, 29 aa, synthetic construct
PQRPVHGLGVPLHSATPLPRRPQPRQFFN

SEQ ID NO: 40710 - protein, 29 aa, synthetic construct
QEVLLTVQKDCQCERLFHGNYSRATEICV

SEQ ID NO: 40711 - protein, 29 aa, synthetic construct
AAGEGEARPSTPQRQASNASKSNIAAANS

SEQ ID NO: 40712 - protein, 29 aa, synthetic construct
FLKGGGGGGGGGGGLGAFEAAGFHLNEHL

SEQ ID NO: 40713 - protein, 29 aa, synthetic construct
QVMQAKKKELARRDDIEDGDSMISSATSD

SEQ ID NO: 40714 - protein, 29 aa, synthetic construct
SVFSSCQRDCLTCQEKLHPALDSFDLEVC

SEQ ID NO: 40715 - protein, 29 aa, synthetic construct
SSLKLVKENNIRSVAFPCISTGIYGFPNE

SEQ ID NO: 40716 - protein, 29 aa, synthetic construct
SGTRHTESSSRGQAASSHEQARSSAGERH

SEQ ID NO: 40717 - protein, 29 aa, synthetic construct
FLKGGGGGGGGGGGLGGGLGNVLGGLISG

SEQ ID NO: 40718 - protein, 29 aa, synthetic construct
QVIAVHIDNGFMRKRESQSVEEALKKLGI

SEQ ID NO: 40719 - protein, 29 aa, synthetic construct
TGGHEERKTKRPSLRLFGDHDYCQSINSK

SEQ ID NO: 40720 - protein, 29 aa, synthetic construct
EAALNWAEVECQRQDLALSIENKRKVLGK

SEQ ID NO: 40721 - protein, 29 aa, synthetic construct
VNTHRPREYWDYESHVVEWGNQDDYQLVR

SEQ ID NO: 40722 - protein, 29 aa, synthetic construct
PTAEFQDRISGASEKDIVHSGLAYTMERS

SEQ ID NO: 40723 - protein, 29 aa, synthetic construct
GSALCTSSIVIKEPKKPPVFDQHLTPVTV

SEQ ID NO: 40724 - protein, 29 aa, synthetic construct
QLELPEQQEGQLELPQQQEGQLELSEQQE

SEQ ID NO: 40725 - protein, 29 aa, synthetic construct
HTSKLIQEDILDTGNDKNGKEEVIKRKIP

SEQ ID NO: 40726 - protein, 29 aa, synthetic construct
FYVQVSGTEYEVAQRPAKALEGQGACGAG

SEQ ID NO: 40727 - protein, 29 aa, synthetic construct
VSPSRRWWYRCYAYDSNSPYEWSLPSDLL

SEQ ID NO: 40728 - protein, 29 aa, synthetic construct
QDCERAICIDPAYSKAYGRMGLALSSLNK

SEQ ID NO: 40729 - protein, 17 aa, synthetic construct
MNDHNAYRCFSQPRHIS

SEQ ID NO: 40730 - protein, 29 aa, synthetic construct
THATDKYSDYHPCTETFSYQSTFSVHQKV

SEQ ID NO: 40731 - protein, 29 aa, synthetic construct
SIPTPPVTTPEGDDRPESPEYSGGNIVRV

SEQ ID NO: 40732 - protein, 29 aa, synthetic construct
SKLQEIYQELTQLKAAVGELPEKSKLQEI

SEQ ID NO: 40733 - protein, 29 aa, synthetic construct
TIVRKKALPDSGEDRDTKEALKEFDFLVT

SEQ ID NO: 40734 - protein, 29 aa, synthetic construct
MEESVAHAVAAVGSRLYISGGFGGVALGR

SEQ ID NO: 40735 - protein, 29 aa, synthetic construct
FLISLTQKIPTAHKQSHVSMLQEDLLRLP

SEQ ID NO: 40736 - protein, 29 aa, synthetic construct
ETFGSLEETSPPPCWNSVTDSLLLVHERY

SEQ ID NO: 40737 - protein, 29 aa, synthetic construct
KKAQWGSSGAASEPVVLGEEGCGFPSTNE

SEQ ID NO: 40738 - protein, 29 aa, synthetic construct
IRRLLETSNARAVIIFANEDDIRRVLEAA

SEQ ID NO: 40739 - protein, 23 aa, synthetic construct
MSERQGAGATNGKDKTSGENDGQ

SEQ ID NO: 40740 - protein, 29 aa, synthetic construct
RGGFAGVQGTFCMAAWGFCFAVSALVVAC

SEQ ID NO: 40741 - protein, 29 aa, synthetic construct
KNKDRQLIGRVEASDADAGIDGVILYSLG

SEQ ID NO: 40742 - protein, 29 aa, synthetic construct
QHWELIQEDILDTGNDKNGKEEVIKRKIP

SEQ ID NO: 40743 - protein, 29 aa, synthetic construct
IKLNELWKNFGFKKDSEKLPPCKKPLSPV

SEQ ID NO: 40744 - protein, 29 aa, synthetic construct
PVTSPSSASSGHTTPLPVTDASSVPTGHA

SEQ ID NO: 40745 - protein, 29 aa, synthetic construct
SVAELRPDSPAHVLLAALLHETRAGPTAV

SEQ ID NO: 40746 - protein, 29 aa, synthetic construct
TAAFAAGKDSGLDWGIASQRIPAEELSHL

SEQ ID NO: 40747 - protein, 14 aa, synthetic construct
RSPYYKYEEKRKKK

SEQ ID NO: 40748 - protein, 29 aa, synthetic construct
TDEYDPTLICSPTHGGLGSQPYYPQHPMV

SEQ ID NO: 40749 - protein, 29 aa, synthetic construct
SSGASGLNDDYVFVTPVEVDSAGSYISHD

SEQ ID NO: 40750 - protein, 29 aa, synthetic construct
RCDHCRVLFLDYVMFTIHMGCHGFRDPFE

SEQ ID NO: 40751 - protein, 29 aa, synthetic construct
VVDAKTIFTGHTAVVEDVSWHLLHESLFG

SEQ ID NO: 40752 - protein, 29 aa, synthetic construct
GEAAASPEAEQFPESSELEDDDAEGLSSR

SEQ ID NO: 40753 - protein, 29 aa, synthetic construct
GYILVYSAKRKASMGMLRAFLSEVQDTIP

SEQ ID NO: 40754 - protein, 29 aa, synthetic construct
MSFVSTNNLMLVTFKSPHIRRLSGIRAYF

SEQ ID NO: 40755 - protein, 29 aa, synthetic construct
GNDLFREKDYKQALVQYMEGLNVADYAAS

SEQ ID NO: 40756 - protein, 29 aa, synthetic construct
KRTVPDNQCFIQFLSNPAVTFGTAIAAFY

SEQ ID NO: 40757 - protein, 29 aa, synthetic construct
HGYVDVTIDIRSIGVPWTLHTWLESLRIA

SEQ ID NO: 40758 - protein, 29 aa, synthetic construct
SDEGLWDMFVKDIPRSATSYTLSLDKLRQ

SEQ ID NO: 40759 - protein, 29 aa, synthetic construct
NYSETPLQLAAAVGVPWTLHTWLESLRIA

SEQ ID NO: 40760 - protein, 29 aa, synthetic construct
YLCKSEEFMDPATFINMYNRPIHITLDSE

SEQ ID NO: 40761 - protein, 29 aa, synthetic construct
HPVQCQENSDEAKAPQTPSALLGQKSNTD

SEQ ID NO: 40762 - protein, 29 aa, synthetic construct
FGVKIAVVTKRERSKVPYIVRQCVEEIER

SEQ ID NO: 40763 - protein, 29 aa, synthetic construct
DRKLALCWARALPSRPGASRSGGLEESRD

SEQ ID NO: 40764 - protein, 29 aa, synthetic construct
AKSNSCRALATGMRRKHKISGMILSFFKL

SEQ ID NO: 40765 - protein, 29 aa, synthetic construct
KAKSNSCRALATGMRRKHKISGMILSFFK

SEQ ID NO: 40766 - protein, 29 aa, synthetic construct
TVPGSTMKMGSLERKKLRYSDLDFEVMHT

SEQ ID NO: 40767 - protein, 29 aa, synthetic construct
TVPGSTMKMGSLERKKLRYSDLDFEKVMH

SEQ ID NO: 40768 - protein, 29 aa, synthetic construct
RAQLLGLIQRVVRENKEGCYTNRMYQRAE

SEQ ID NO: 40769 - protein, 29 aa, synthetic construct
KIAVVTKRERSKVPYIVRQCVEEIERRGM

SEQ ID NO: 40770 - protein, 22 aa, synthetic construct
MSGRGKQGGKARAKAKTRSSRA

SEQ ID NO: 40771 - protein, 29 aa, synthetic construct
YKCEECGKAFKCSSILTTHKRIHTADKPY

SEQ ID NO: 40772 - protein, 29 aa, synthetic construct
ESPCESGCGDMDEDPSCPQLPPRDSPRCL

SEQ ID NO: 40773 - protein, 29 aa, synthetic construct
GFPGPKGTMGHGLPGQKGEHGERGDVGKK

SEQ ID NO: 40774 - protein, 29 aa, synthetic construct
VNLYVQIHLLQFHGTKYAAIDPSMVSAEE

SEQ ID NO: 40775 - protein, 29 aa, synthetic construct
MRPIKTEPGLSSHYGHSSSVSQTFSVSAM

SEQ ID NO: 40776 - protein, 29 aa, synthetic construct
KKPEDSSAPRCLGKSKGRTHPRIDPDVIH

SEQ ID NO: 40777 - protein, 29 aa, synthetic construct
RAGPGTGAQPLWGVRSGSGHRQLLSVAAT

SEQ ID NO: 40778 - protein, 29 aa, synthetic construct
AGPGTGAQPLWGVRSGSGHRQLLSVAATP

SEQ ID NO: 40779 - protein, 29 aa, synthetic construct
SGRAVNDGSWHSVFLELNRNFTSLSLDDS

SEQ ID NO: 40780 - protein, 29 aa, synthetic construct
LVTVMKVEKAPQETYADIGGLDNQIQEIK

SEQ ID NO: 40781 - protein, 29 aa, synthetic construct
SQETDSCTPITSEVSDTMVCQSSSTVGQS

SEQ ID NO: 40782 - protein, 29 aa, synthetic construct
RCQAWQDWPLTQVTFYRDGSALGPPGPNR

SEQ ID NO: 40783 - protein, 29 aa, synthetic construct
HGPAARGDTGDTGASPPPPAGPSLARPDA

SEQ ID NO: 40784 - protein, 29 aa, synthetic construct
AHPGAGGDRTRPRRRRSTESWIERCLNES

SEQ ID NO: 40785 - protein, 29 aa, synthetic construct
KSSLKFSPGPCPGPGPGPSPGPGPGPSPG

SEQ ID NO: 40786 - protein, 29 aa, synthetic construct
KVVLEAMARDPPNRVPPTTEGTRGLLSCL

SEQ ID NO: 40787 - protein, 11 aa, synthetic construct
DHLRPRDTTGD

SEQ ID NO: 40788 - protein, 29 aa, synthetic construct
EVNSGCTGKTLLVRPYITTEDVCQICAEK

SEQ ID NO: 40789 - protein, 29 aa, synthetic construct
CGYACCLQCLNSLQKEPDGEGLLCRFCSV

SEQ ID NO: 40790 - protein, 29 aa, synthetic construct
LLIQVERSEDPPKRIYFNKQENCILLRLD

SEQ ID NO: 40791 - protein, 29 aa, synthetic construct
FDRTLYNGHSGYNPATGIFTCPVGGVYYF

SEQ ID NO: 40792 - protein, 29 aa, synthetic construct
EIRILAVITIQAGVRGYLARRRIRLWHRG

SEQ ID NO: 40793 - protein, 29 aa, synthetic construct
GSRYPELVLKAPLDREEQPHHHLVLTAVD

SEQ ID NO: 40794 - protein, 29 aa, synthetic construct
IGNSCGTKGHEAAKLMAAHITANTNPFSW

SEQ ID NO: 40795 - protein, 29 aa, synthetic construct
SRLSGTLSFTSAEDDEDDEDEDDEEAGPD

SEQ ID NO: 40796 - protein, 29 aa, synthetic construct
QLPLGDGTSGEDAERSPPPDGQWGSQLLA

SEQ ID NO: 40797 - protein, 29 aa, synthetic construct
TAGTERPCGDGRSQRSPEGGGGAGARGGA

SEQ ID NO: 40798 - protein, 29 aa, synthetic construct
KDKLDLSECVDKIKEKDKLYSHHTEKCHK

SEQ ID NO: 40799 - protein, 29 aa, synthetic construct
MSLPPPGSEEEEEEEDETTSLLPAIAAPP

SEQ ID NO: 40800 - protein, 29 aa, synthetic construct
LSYMEDHLKNKNRLEKEWEALCAYQAEPN

SEQ ID NO: 40801 - protein, 29 aa, synthetic construct
SREGKFQNPYAHSLTSALHYLVPVRPRRQ

SEQ ID NO: 40802 - protein, 29 aa, synthetic construct
LALSGDTRPRFLWQPKRECHFFNGTERVR

SEQ ID NO: 40803 - protein, 29 aa, synthetic construct
VAIMCLPFTFVYTLMDHWVFGEAMCKLNP

SEQ ID NO: 40804 - protein, 29 aa, synthetic construct
AVGVIDILPNCVSSVYLYYDPDYSFLSLG

SEQ ID NO: 40805 - protein, 29 aa, synthetic construct
KFQLSGQKLFIPQITTKHSGLYACSVRNS

SEQ ID NO: 40806 - protein, 29 aa, synthetic construct
VLTIKNNNLSKDHYMLIVKVSDGKFYSTS

SEQ ID NO: 40807 - protein, 29 aa, synthetic construct
ALSGDTRPRFLWQPKRECHFFNGTERVRF

SEQ ID NO: 40808 - protein, 29 aa, synthetic construct
PLALSGDTRPRFLWQPKRECHFFNGTERV

SEQ ID NO: 40809 - protein, 29 aa, synthetic construct
VHVPPNIAGTDEPRDITVLRNRQVTLECK

SEQ ID NO: 40810 - protein, 24 aa, synthetic construct
VEALRFVKRHCKRCVIEHTNPAFF

SEQ ID NO: 40811 - protein, 29 aa, synthetic construct
LNIYLDELIKNTQTYTFTISQSVLVTNLK

SEQ ID NO: 40812 - protein, 29 aa, synthetic construct
CLLGPTLKKRYPTVHEIEVIGGYLALQKS

SEQ ID NO: 40813 - protein, 29 aa, synthetic construct
RESLCSIRRASSVHDIEGFGVHPKNIFRD

SEQ ID NO: 40814 - protein, 29 aa, synthetic construct
HLQRLRSYSAGEASEVSRNRGASLLARPG

SEQ ID NO: 40815 - protein, 29 aa, synthetic construct
AMDNDIVQGAEDQGIQGEEGAYERDNQHQ

SEQ ID NO: 40816 - protein, 29 aa, synthetic construct
THLDWSKDGNFIMSNSGDYEILYWDVAGG

SEQ ID NO: 40817 - protein, 29 aa, synthetic construct
TFRKFDAPFTLTWFATNWNFLFFPLYYVG

SEQ ID NO: 40818 - protein, 29 aa, synthetic construct
VGAALFKGIKSSGKVVYFTALFPYVVLLI

SEQ ID NO: 40819 - protein, 29 aa, synthetic construct
LVSSPQPPPPIGMANRGPAYGLSREVQQK

SEQ ID NO: 40820 - protein, 29 aa, synthetic construct
MVNKLAEGAERDGKNNVAFMSYFLQGKVD

SEQ ID NO: 40821 - protein, 29 aa, synthetic construct
CTCSRASQVECTGARIVAVPTPLPWNAMS

SEQ ID NO: 40822 - protein, 17 aa, synthetic construct
MANRGPAYGLSREVQQK

SEQ ID NO: 40823 - protein, 29 aa, synthetic construct
GKAFILSSTLSKHKRIHTGEKPYKCEECG

SEQ ID NO: 40824 - protein, 29 aa, synthetic construct
YECKQCGKAFRSASVLQKHIRTHTGEKPY

SEQ ID NO: 40825 - protein, 29 aa, synthetic construct
TRGLHQQDCVHEAEEGSKLKILGPFSNFF

SEQ ID NO: 40826 - protein, 29 aa, synthetic construct
PNTSVEQGSGLLSTLVGEKSVTQRWERGE

SEQ ID NO: 40827 - protein, 29 aa, synthetic construct
MYNSLMKISERYGPVFTIHLGPRRVVVLC

SEQ ID NO: 40828 - protein, 29 aa, synthetic construct
RAHLLLAQLEHSEPIEAEPEALSPVPALK

SEQ ID NO: 40829 - protein, 29 aa, synthetic construct
NGNFNNSYSLHKGDYNDSVQVVDCGLSLN

SEQ ID NO: 40830 - protein, 29 aa, synthetic construct
ESVLWQLFGPFGAVTNVKVIRDFTTNKCK

SEQ ID NO: 40831 - protein, 29 aa, synthetic construct
CGNFDGIQNNDLTSSNLQVEEDPVDFGNS

SEQ ID NO: 40832 - protein, 29 aa, synthetic construct
GSGAWVRGRHLVLLDTAQAAAAGHRLLAE

SEQ ID NO: 40833 - protein, 29 aa, synthetic construct
RDFHFSMDSLLAEGAGLGGGDVPGLTDEE

SEQ ID NO: 40834 - protein, 29 aa, synthetic construct
YYGPQEGDKKGQSPLLHSSKPHHFLLGHS

SEQ ID NO: 40835 - protein, 29 aa, synthetic construct
SCNCLLLKVNQIGSVTESLQACKLAQANG

SEQ ID NO: 40836 - protein, 29 aa, synthetic construct
RRGMEEVGIYRVSGVATDIQALKAAFDVN

SEQ ID NO: 40837 - protein, 29 aa, synthetic construct
ADRLRDPDSHIVKKINNLNKSALKYYQLF

SEQ ID NO: 40838 - protein, 29 aa, synthetic construct
ALQDVNTNINEYKMRKEVASKYTKVEQLT

SEQ ID NO: 40839 - protein, 29 aa, synthetic construct
LRLDSTGVILSPGYPDSYPNLQMCAWSIS

SEQ ID NO: 40840 - protein, 29 aa, synthetic construct
GGFDPQGALRNMAVAKHNLNIMIKRYNST

SEQ ID NO: 40841 - protein, 29 aa, synthetic construct
KGIIHLVTESQSLNIKRDATTKEQSKPLI

SEQ ID NO: 40842 - protein, 29 aa, synthetic construct
ALTSGDETSLGRAQRQRKGILKNRLQYPL

SEQ ID NO: 40843 - protein, 29 aa, synthetic construct
KDLYANNVLSGGTTMYPGIADRMQKEITA

SEQ ID NO: 40844 - protein, 29 aa, synthetic construct
GVVLYIMLSGYPPFVGHCGADCGWDRGEV

SEQ ID NO: 40845 - protein, 29 aa, synthetic construct
KVCPAKFTQFVHLKLHKRLHTRERPHKCS

SEQ ID NO: 40846 - protein, 29 aa, synthetic construct
QFQMYRWAFIPEASDDSGLEVRRQGIHQR

SEQ ID NO: 40847 - protein, 29 aa, synthetic construct
TGQLNRFVQLSGRPHLPGKKKIRWDPVRR

SEQ ID NO: 40848 - protein, 29 aa, synthetic construct
FEAQERATEAENVPPVIPTPHHYLLSVYR

SEQ ID NO: 40849 - protein, 29 aa, synthetic construct
HRVVDTFQDYFGVCSEPVIKDNVVVVYEV

SEQ ID NO: 40850 - protein, 29 aa, synthetic construct
RFSATVSVADTAQRSVSKYRCVIRSDGGS

SEQ ID NO: 40851 - protein, 29 aa, synthetic construct
EKKQIYAIKYVNLEEADNQTLDSYRNEIA

SEQ ID NO: 40852 - protein, 29 aa, synthetic construct
SKFGGFDPQGALRNMAVAKHNLNIMIKRY

SEQ ID NO: 40853 - protein, 29 aa, synthetic construct
GAPRGSSLAPLLLHAPRVTPPRSPSPPRS

SEQ ID NO: 40854 - protein, 29 aa, synthetic construct
EQDRILWVQAMYRATGQSHKPVPPTQVQK

SEQ ID NO: 40855 - protein, 29 aa, synthetic construct
TAILATLPEFVVYKPQMEDQKYKCAFSRT

SEQ ID NO: 40856 - protein, 29 aa, synthetic construct
LGSEQFAETPKENHSNYRTLLEKEKEWAL

SEQ ID NO: 40857 - protein, 29 aa, synthetic construct
EFSKFGGFDPQGALRNMAVAKHNLNIMIK

SEQ ID NO: 40858 - protein, 29 aa, synthetic construct
HNYQNWRVYDVLVLKGSQLSARAADGSPC

SEQ ID NO: 40859 - protein, 29 aa, synthetic construct
GGSSKVFQVLNEKKQIYAIKYVNLEEADN

SEQ ID NO: 40860 - protein, 29 aa, synthetic construct
KLHEIYIQAKDKGANPEGAHCKVLVEVVD

SEQ ID NO: 40861 - protein, 29 aa, synthetic construct
KVIVVRNRRLGVLYRAVQLLILLYFVWYV

SEQ ID NO: 40862 - protein, 29 aa, synthetic construct
EKLDLRNNIISTVQPGAFLGLGELKRLDL

SEQ ID NO: 40863 - protein, 29 aa, synthetic construct
ETKSGPFEEKVIQVRYDPCRSADIALVAG

SEQ ID NO: 40864 - protein, 29 aa, synthetic construct
YEIEDGSTPNGRDLRFGFDPLAFPEFSWR

SEQ ID NO: 40865 - protein, 29 aa, synthetic construct
SPIIQQLEKSDAEYTNSPLVPTFCTPGLK

SEQ ID NO: 40866 - protein, 29 aa, synthetic construct
RSAYMLTDPYGSQARLGVRGGLVLYNLPF

SEQ ID NO: 40867 - protein, 29 aa, synthetic construct
GQLRMEWETPDNQVGAEVQFRHRTPSSPW

SEQ ID NO: 40868 - protein, 29 aa, synthetic construct
LAENISHGLLLRKAPVLQYLYYLAQIGIA

SEQ ID NO: 40869 - protein, 29 aa, synthetic construct
STLHDWYGQEIVELRQCWQKRAQGSHSKC

SEQ ID NO: 40870 - protein, 29 aa, synthetic construct
PPRSNHAAEEASSEDEEEEEVQAMQSFNS

SEQ ID NO: 40871 - protein, 29 aa, synthetic construct
IPAAQVALAKQLAGDIALELQAYFRSKFP

SEQ ID NO: 40872 - protein, 29 aa, synthetic construct
KQIYAIKYVNLEEADNQTLDSYRNEIAYL

SEQ ID NO: 40873 - protein, 29 aa, synthetic construct
SGDEENAGTEEIKNEINGNWISASSINEA

SEQ ID NO: 40874 - protein, 29 aa, synthetic construct
RRHVCLTTLVIMGSMAVMDAYLVEQNQGP

SEQ ID NO: 40875 - protein, 29 aa, synthetic construct
HPSSPGGFGQTAGWRHRPGAAGLLSEQVP

SEQ ID NO: 40876 - protein, 29 aa, synthetic construct
SIKQDCFHCMEHDQRVTHSDISDPKNSKN

SEQ ID NO: 40877 - protein, 29 aa, synthetic construct
DGPSVSWSRQTQPPAALTGRGDAPNRSRN

SEQ ID NO: 40878 - protein, 29 aa, synthetic construct
FSGQPPGPPQAPPGLPGQASLLQAAPGAP

SEQ ID NO: 40879 - protein, 29 aa, synthetic construct
RGLREALLTRNMAAGCRLEEEEYEDDAYG

SEQ ID NO: 40880 - protein, 29 aa, synthetic construct
FEGFPQSVLQIPVSAASSSTLVSIFQSSP

SEQ ID NO: 40881 - protein, 29 aa, synthetic construct
GRIECHYEPMESYFFKETSHESVDSSKEE

SEQ ID NO: 40882 - protein, 29 aa, synthetic construct
PPALPPPETAAAATTAAAASSSAASPHYQ

SEQ ID NO: 40883 - protein, 29 aa, synthetic construct
PRDPENFPFVVLGNKIDLENRQVATKRAQ

SEQ ID NO: 40884 - protein, 29 aa, synthetic construct
TQGSLRITNISSDDSGKQISCVAENLVGE

SEQ ID NO: 40885 - protein, 29 aa, synthetic construct
LISIITFCLETLPEFRDERELLRHPPAPH

SEQ ID NO: 40886 - protein, 29 aa, synthetic construct
TGDSGAPPVPPTGDAGPPPVPPTGDSGAP

SEQ ID NO: 40887 - protein, 29 aa, synthetic construct
PDYGTATRRRPECGRGLHTRAYEDTADDG

SEQ ID NO: 40888 - protein, 29 aa, synthetic construct
DPGGERGPWWREGTLAVRGDPGGERGPWR

SEQ ID NO: 40889 - protein, 29 aa, synthetic construct
NDQKGSASLTVVQLSILINNIPDESQVEK

SEQ ID NO: 40890 - protein, 29 aa, synthetic construct
KMGSRSTSESRSRSRSRSRSASSNSRKSL

SEQ ID NO: 40891 - protein, 29 aa, synthetic construct
TASTESSETTTATTIGSETTTASTEGSET

SEQ ID NO: 40892 - protein, 29 aa, synthetic construct
DSGAPPVPPTGDAGPPPVPPTGDSGAPPV

SEQ ID NO: 40893 - protein, 29 aa, synthetic construct
NPVPDISWRRLDGSPLPGKVKYSKSQAIL

SEQ ID NO: 40894 - protein, 29 aa, synthetic construct
DGETCLLDILDTAGQEEYSAMRDQYMRTG

SEQ ID NO: 40895 - protein, 26 aa, synthetic construct
YGFGSTSGGPLMHSPYFSSSGNGINF

SEQ ID NO: 40896 - protein, 29 aa, synthetic construct
DAVGVCLLGDKLYAVGGYDGQAYLNTVEA

SEQ ID NO: 40897 - protein, 29 aa, synthetic construct
TEELNKQVVSSSEQLQSYQAEIIELRRTV

SEQ ID NO: 40898 - protein, 29 aa, synthetic construct
NSFPQIFRDRTDIQCLIPCAIDQDPYFRM

SEQ ID NO: 40899 - protein, 29 aa, synthetic construct
EPVNGRHTLGENIADNGGLKAAYRAYQNW

SEQ ID NO: 40900 - protein, 29 aa, synthetic construct
FTGGLHRELPLHLNKRYGAVIKRLSHLEV

SEQ ID NO: 40901 - protein, 29 aa, synthetic construct
ATRLLKLRYLILGSAVGGGYTAKKTFDQW

SEQ ID NO: 40902 - protein, 29 aa, synthetic construct
TYVTFSPNGTELLVNMGGEQVYLFDLTYK

SEQ ID NO: 40903 - protein, 29 aa, synthetic construct
DTSGWKVVKTSVQWCAPIVPATQEANTGG

SEQ ID NO: 40904 - protein, 29 aa, synthetic construct
FCEYWLFYTIMAYTPTYISSVLQANLRDS

SEQ ID NO: 40905 - protein, 29 aa, synthetic construct
VIIVGNGPSGICLSYLLSGYTPYTKPDAI

SEQ ID NO: 40906 - protein, 29 aa, synthetic construct
GMQMFFYVTLAGSEFFLLATMAYDRYVAI

SEQ ID NO: 40907 - protein, 29 aa, synthetic construct
YGVDDKFYSKLDQEDALLGSYPVDDGCRI

SEQ ID NO: 40908 - protein, 29 aa, synthetic construct
TLTNHRKIYTEEKPYKCEEYNKSPKQLST

SEQ ID NO: 40909 - protein, 29 aa, synthetic construct
DYDPKLQMQEGVRSGFAMAGHENLSHGHT

SEQ ID NO: 40910 - protein, 29 aa, synthetic construct
CGVLDKAHYGSSAYGLVHCCYEIYGGETS

SEQ ID NO: 40911 - protein, 29 aa, synthetic construct
QKKGIQVLPDGRVTNIPQGMVTDQFGMIG

SEQ ID NO: 40912 - protein, 29 aa, synthetic construct
MPSLKMPKVDLKGPQVDIKGPKLDLKDPK

SEQ ID NO: 40913 - protein, 29 aa, synthetic construct
YSTPSGCLELTDSCQPYRSAFYILEQQRV

SEQ ID NO: 40914 - protein, 29 aa, synthetic construct
FPQIILSGSQLAPERHYEISRDGRLRSRS

SEQ ID NO: 40915 - protein, 29 aa, synthetic construct
AVEFTTLADYLHLLQAAAQALNPLGPSAM

SEQ ID NO: 40916 - protein, 17 aa, synthetic construct
MDTAEEGRIYKCLFTGS

SEQ ID NO: 40917 - protein, 29 aa, synthetic construct
EDLDQTVVSITDVDFIYQNEFLGCTDRLV

SEQ ID NO: 40918 - protein, 29 aa, synthetic construct
CQGELLTLITFGCSIEFGPAEFIPLHPLI

SEQ ID NO: 40919 - protein, 29 aa, synthetic construct
CMASLVHLAFQIYEALRPRYLEIRAVMEQ

SEQ ID NO: 40920 - protein, 29 aa, synthetic construct
LGDSFDPGTVMRFSCEAGHVLRGSSERTC

SEQ ID NO: 40921 - protein, 29 aa, synthetic construct
ITRLHQYIFSHILRLEKPALEFKPTDADS

SEQ ID NO: 40922 - protein, 29 aa, synthetic construct
FMKGSPEDKSRLMFTMYDLDENGFLSKDE

SEQ ID NO: 40923 - protein, 29 aa, synthetic construct
EGGDLHTLIIAEAFEDDTGRYTCLATNPS

SEQ ID NO: 40924 - protein, 29 aa, synthetic construct
SENTDVFKFSIELFHTMGRALLSLQKFKE

SEQ ID NO: 40925 - protein, 29 aa, synthetic construct
FGEEVEKSTSVTYTPTIVPSSASAYVSEE

SEQ ID NO: 40926 - protein, 29 aa, synthetic construct
VKPADLKKRIESLIDRDYMERDKENPNQY

SEQ ID NO: 40927 - protein, 29 aa, synthetic construct
EVDPLSDKGTTPLQLAIIRERSSCVKILL

SEQ ID NO: 40928 - protein, 29 aa, synthetic construct
QQNPVSEASDIWAMGVISYLSLTCSSPFA

SEQ ID NO: 40929 - protein, 29 aa, synthetic construct
DDSRCLYTHEEYISLVLNSGSGLSHDYAN

SEQ ID NO: 40930 - protein, 29 aa, synthetic construct
QHAFYQLIHQGTKMIPCDFLIPVQTQHPI

SEQ ID NO: 40931 - protein, 29 aa, synthetic construct
AQEFFIHGFSVLESSVLLIMSFDRFLAIH

SEQ ID NO: 40932 - protein, 29 aa, synthetic construct
APYDPRWMLAGRPHPTLKGTWQSGFFDHG

SEQ ID NO: 40933 - protein, 29 aa, synthetic construct
DVEKNNSRIKLGLKSLVSKGTLVQTKGTG

SEQ ID NO: 40934 - protein, 29 aa, synthetic construct
YAKGALQYLVPILTQTLTKQDENDDDDDW

SEQ ID NO: 40935 - protein, 29 aa, synthetic construct
HVQREKAPRRRSLKKNLVPQINLASSFFP

SEQ ID NO: 40936 - protein, 29 aa, synthetic construct
LLELQNEAVFMWTAELENIATLCFKALEN

SEQ ID NO: 40937 - protein, 29 aa, synthetic construct
HKEKYTLEQALLSASQEIEMHADNPAAIQ

SEQ ID NO: 40938 - protein, 29 aa, synthetic construct
LRISLLGRSWLLPPGTLDQFICLGRAQGL

SEQ ID NO: 40939 - protein, 29 aa, synthetic construct
LFDIARIERCNQLLRALKLVITALKCHKY

SEQ ID NO: 40940 - protein, 29 aa, synthetic construct
VIPNDISSNAAILGGQPPNVTSNSGILGV

SEQ ID NO: 40941 - protein, 29 aa, synthetic construct
SLHSNQEKIKVLLNVIQDLEKARALTEGR

SEQ ID NO: 40942 - protein, 29 aa, synthetic construct
SQNRNPDALTGNVNVLAAKIAVLSSSCTI

SEQ ID NO: 40943 - protein, 29 aa, synthetic construct
FSNQAESMMVPGNAAGVAKQFLRCIFHQL

SEQ ID NO: 40944 - protein, 29 aa, synthetic construct
LSPPALATHYMPYGMALTVIGFLLPFAAL

SEQ ID NO: 40945 - protein, 29 aa, synthetic construct
CKECGKSFSRRGQFTEHQKIHTGVKPYKC

SEQ ID NO: 40946 - protein, 20 aa, synthetic construct
WGWAIIKSYDLDPGAGSLEI

SEQ ID NO: 40947 - protein, 29 aa, synthetic construct
VPITGMPAVCSPGMVPVALPPAAVNAQPR

SEQ ID NO: 40948 - protein, 29 aa, synthetic construct
EKVKPRKDAHLFSIGAIMWHVIARDFGQS

SEQ ID NO: 40949 - protein, 29 aa, synthetic construct
EGGQAPFHYFLGGTRLHPAAPGAPGGRTS

SEQ ID NO: 40950 - protein, 29 aa, synthetic construct
MAELRQVPGGRETPQGELRPEVVEDEVPR

SEQ ID NO: 40951 - protein, 29 aa, synthetic construct
LPTPPTMAIIRALNLAHLIDGILVAPCYF

SEQ ID NO: 40952 - protein, 29 aa, synthetic construct
QTYWLDPAKTLAEHKELINTGPPYTLYFG

SEQ ID NO: 40953 - protein, 29 aa, synthetic construct
ITVSPNEKHLFRGLSLNGDLLAQEAQFVV

SEQ ID NO: 40954 - protein, 29 aa, synthetic construct
GCQPGAEANIAPMCLLANVAHANRVRVGS

SEQ ID NO: 40955 - protein, 29 aa, synthetic construct
GEACKKVFLDCCNYITELRRQHARASHLG

SEQ ID NO: 40956 - protein, 29 aa, synthetic construct
LCITISYTMILQAVVSLSSADARQKAFST

SEQ ID NO: 40957 - protein, 29 aa, synthetic construct
EGTPGSRAAHALSRRGHRVHELPTSSPGG

SEQ ID NO: 40958 - protein, 29 aa, synthetic construct
GVILYEALFGQPPFASRSFSELEEKIRSN

SEQ ID NO: 40959 - protein, 29 aa, synthetic construct
YQHSLGELLLLLAAEPPGRRRELLHTEVQ

SEQ ID NO: 40960 - protein, 29 aa, synthetic construct
SLKLKSKTTSWEDKLKLAHFAWISHQCFL

SEQ ID NO: 40961 - protein, 29 aa, synthetic construct
GHSLQRHHSVEAAGPPRASTSSSGSVRSP

SEQ ID NO: 40962 - protein, 29 aa, synthetic construct
MVAHGLLRPMVAPQSGDPDPGASVGSSRS

SEQ ID NO: 40963 - protein, 29 aa, synthetic construct
DEDLDYTPTSASFVNKQPTLQAAELIDSE

SEQ ID NO: 40964 - protein, 29 aa, synthetic construct
RSWQPVSRIPMPPSSPQPRGAPRQRPIPL

SEQ ID NO: 40965 - protein, 29 aa, synthetic construct
GPPPKPPVSSGSGSSSSSSSCSSRKVKLQ

SEQ ID NO: 40966 - protein, 29 aa, synthetic construct
GPSWDLPAAPGRDPAAGRGAEASAAGPPG

SEQ ID NO: 40967 - protein, 29 aa, synthetic construct
DADTDTAGESALPTMTARQRVWRAFENPH

SEQ ID NO: 40968 - protein, 29 aa, synthetic construct
TQDQLLLPHAGYARPWSPAEDSRIRLTAR

SEQ ID NO: 40969 - protein, 29 aa, synthetic construct
QDQLILQIISLMDKLLRKENLDLKLTPYK

SEQ ID NO: 40970 - protein, 29 aa, synthetic construct
PKSLNLLPEAKHPGDPQRGFKPKTRTPEE

SEQ ID NO: 40971 - protein, 20 aa, synthetic construct
LDCATNEENPVISGEQIVQQ

SEQ ID NO: 40972 - protein, 29 aa, synthetic construct
QHPRSPGAPCQECSRCSLWTDPTEDDEKL

SEQ ID NO: 40973 - protein, 29 aa, synthetic construct
AAPTRNTCTTGITDPPPPDGSPNITSVSH

SEQ ID NO: 40974 - protein, 29 aa, synthetic construct
SSGLSSERSDSDQVLPNENGGTPNHRPTG

SEQ ID NO: 40975 - protein, 29 aa, synthetic construct
DRENIDDLNMEFNPSDHPRASTIFLSKSQ

SEQ ID NO: 40976 - protein, 29 aa, synthetic construct
NILRENDFEPKFLCEVKLAFKCDGEIKTF

SEQ ID NO: 40977 - protein, 29 aa, synthetic construct
LSHSSKIIIVNRNREEMLLNSDIFWKPQE

SEQ ID NO: 40978 - protein, 29 aa, synthetic construct
NVDSEMMSNPPVRATASGVMSAPPVRALD

SEQ ID NO: 40979 - protein, 29 aa, synthetic construct
PTQRTYSSSLKRSSPRTISFRMKPKKENS

SEQ ID NO: 40980 - protein, 29 aa, synthetic construct
VKGAKPHFITSSVEHDSIRLPLEHLVEEQ

SEQ ID NO: 40981 - protein, 29 aa, synthetic construct
RCHLYCESRETGEVVSMKRMVHDGTRCSY

SEQ ID NO: 40982 - protein, 20 aa, synthetic construct
MEFNPSDHPRASTIFLSKSQ

SEQ ID NO: 40983 - protein, 29 aa, synthetic construct
GEKPYKCEGCGKAFSKVSTLNTHKAIHAE

SEQ ID NO: 40984 - protein, 29 aa, synthetic construct
RLALLCSEKPTHSLLRRIAQQLPRQLQMV

SEQ ID NO: 40985 - protein, 29 aa, synthetic construct
DRRAYPAQITPKMCLLEWCRREKLAQPVY

SEQ ID NO: 40986 - protein, 29 aa, synthetic construct
MLAHPLHVISMRCMVQFVGREAKYSGVLS

SEQ ID NO: 40987 - protein, 29 aa, synthetic construct
GLVGGLKNTLVHSNRWNSHGPSLLSQERS

SEQ ID NO: 40988 - protein, 29 aa, synthetic construct
SFIALVNCIDWVKGRKISSVDRILTALAI

SEQ ID NO: 40989 - protein, 29 aa, synthetic construct
THTHREPAGDGKSIRTFKESPKQILDPAA

SEQ ID NO: 40990 - protein, 29 aa, synthetic construct
TDPLIKSTILGFVSNFGQVPKQLFTKPHP

SEQ ID NO: 40991 - protein, 19 aa, synthetic construct
MRMDSQKKIAKINVGKRIA

SEQ ID NO: 40992 - protein, 29 aa, synthetic construct
IFIKSLFHNFPSIVLPNENGGTPNHRPTG

SEQ ID NO: 40993 - protein, 29 aa, synthetic construct
PCRHGGTCQDRDNAYLCFCLKGTTGPNCE

SEQ ID NO: 40994 - protein, 29 aa, synthetic construct
PATRVEVSVSCRNLLDRDTFSKSDPICVL

SEQ ID NO: 40995 - protein, 29 aa, synthetic construct
IRAATEVLAALLKSKSNGRRAVNRGYVTS

SEQ ID NO: 40996 - protein, 29 aa, synthetic construct
AAEDLELRSEGLITEKCSSQQPPGSKTIF

SEQ ID NO: 40997 - protein, 29 aa, synthetic construct
KQSDCNVPDYLMYSTVSGSEKNSKIYCPT

SEQ ID NO: 40998 - protein, 29 aa, synthetic construct
DWRTNTLAKANKWTGHNVTVVQRTNTQPF

SEQ ID NO: 40999 - protein, 29 aa, synthetic construct
KAKRYHMDASGEAVSETLQFKAQDLLRAV

SEQ ID NO: 41000 - protein, 29 aa, synthetic construct
EPVNGRHTLGENIADNGGLKAAYRVWCSV

SEQ ID NO: 41001 - protein, 29 aa, synthetic construct
GERLMMPPAAFKGEAGGLLVFPPAFYGAK

SEQ ID NO: 41002 - protein, 29 aa, synthetic construct
FSIVQNIVGTALMILVAIGFKTKLAALTL

SEQ ID NO: 41003 - protein, 29 aa, synthetic construct
LCQGGNSTATLEPPACPKDSGGNNHWVYV

SEQ ID NO: 41004 - protein, 29 aa, synthetic construct
MEVAQNGMAKEDGTGESAGGSPARSLTRS

SEQ ID NO: 41005 - protein, 29 aa, synthetic construct
EDVASSSSESEMEEEGEEEEEEPRLPPSD

SEQ ID NO: 41006 - protein, 29 aa, synthetic construct
RKVRTRSLSDFTGPPQLQALKYKDPASRR

SEQ ID NO: 41007 - protein, 29 aa, synthetic construct
TAVFTPYSAAFLLKETEEGPPATECGYAC

SEQ ID NO: 41008 - protein, 29 aa, synthetic construct
HRKVLRDNIQGITKPAIRRLARRGGVKRI

SEQ ID NO: 41009 - protein, 29 aa, synthetic construct
PNKVQEHYNYTKETLETQETTSRQVASAF

SEQ ID NO: 41010 - protein, 29 aa, synthetic construct
VTQLAIDTEERLKGVIDLIFEKAISEPNF

SEQ ID NO: 41011 - protein, 19 aa, synthetic construct
MAPSALLRPLSRLLAPARL

SEQ ID NO: 41012 - protein, 29 aa, synthetic construct
SSGDLLRDNMLRGTEIGVLAKAFIDQGKL

SEQ ID NO: 41013 - protein, 29 aa, synthetic construct
MFLEEHKYFEESFKAYERGISLFKWPNVS

SEQ ID NO: 41014 - protein, 29 aa, synthetic construct
EYITVGDKYVSQFNRPFNEAASKNKQMLP

SEQ ID NO: 41015 - protein, 17 aa, synthetic construct
MASLLQSDRVLYLVQGE

SEQ ID NO: 41016 - protein, 29 aa, synthetic construct
GTLPAETLLLSPPVKVKGEDGDREPEGTL

SEQ ID NO: 41017 - protein, 29 aa, synthetic construct
YSGALLVFLSLLGWILWYTGNIEISRQEL

SEQ ID NO: 41018 - protein, 29 aa, synthetic construct
QWYKDAISISRLQNPRYKVLASGGLRIQK

SEQ ID NO: 41019 - protein, 29 aa, synthetic construct
AELVPRLFRVASKGRGGLLEVNLQNGILF

SEQ ID NO: 41020 - protein, 20 aa, synthetic construct
MALTSDLGKQIKLKEVEGTL

SEQ ID NO: 41021 - protein, 29 aa, synthetic construct
TAGLTMPTATLGNLRGYGMASPGLAAPSL

SEQ ID NO: 41022 - protein, 29 aa, synthetic construct
SRDVTVLLENYGKFEKGYLIFVVRFLFGL

SEQ ID NO: 41023 - protein, 29 aa, synthetic construct
KSNSLIHTECLSQVQRILRERFCRQSPHS

SEQ ID NO: 41024 - protein, 29 aa, synthetic construct
ELVPRLFRVASKGRGGLLEVNLQNGILFV

SEQ ID NO: 41025 - protein, 29 aa, synthetic construct
LAELVPRLFRVASKGRGGLLEVNLQNGIL

SEQ ID NO: 41026 - protein, 29 aa, synthetic construct
SSSSSPSPRSSSPSSSSSSTSSPSSSSPS

SEQ ID NO: 41027 - protein, 29 aa, synthetic construct
SPSSSSSSSSSSSSSPSSSSPSSSGSSPS

SEQ ID NO: 41028 - protein, 29 aa, synthetic construct
PSSSSSSPSPRSSSPSSSSSSTSSPSSSS

SEQ ID NO: 41029 - protein, 29 aa, synthetic construct
PLPVTDTSSASTRHATPLPVTDTSSASTD

SEQ ID NO: 41030 - protein, 29 aa, synthetic construct
KISYSRIPESETESTASAPNSPRTPLTPP

SEQ ID NO: 41031 - protein, 29 aa, synthetic construct
PTSRATRGRKNRSSGKTPETLVPTAPKLE

SEQ ID NO: 41032 - protein, 29 aa, synthetic construct
KCCGLVNGAADWGNNFQHYPELCACLDKQ

SEQ ID NO: 41033 - protein, 29 aa, synthetic construct
PGSALEPGEEFEIVDRSQLPGPGDLRSAT

SEQ ID NO: 41034 - protein, 29 aa, synthetic construct
AHMRAHSVVFESDGPRGSEVHTTSADAPK

SEQ ID NO: 41035 - protein, 29 aa, synthetic construct
GQTDRQGQSFHYGQPDRQGQSSHYSQMDR

SEQ ID NO: 41036 - protein, 29 aa, synthetic construct
GQTDRQGQSFHYGQPDRQGQSSHYSQMDR

SEQ ID NO: 41037 - DNA, 10 bp, synthetic construct
  source 1..10: mol_type = other DNA
catcctttta

SEQ ID NO: 41038 - DNA, 10 bp, synthetic construct
  source 1..10: mol_type = other DNA
actgaaaaac

SEQ ID NO: 41039 - DNA, 10 bp, synthetic construct
  source 1..10: mol_type = other DNA
aagttgtaat

SEQ ID NO: 41040 - DNA, 10 bp, synthetic construct
  source 1..10: mol_type = other DNA
agaataatct

SEQ ID NO: 41041 - DNA, 10 bp, synthetic construct
  source 1..10: mol_type = other DNA
gctgtacttt

SEQ ID NO: 41042 - DNA, 10 bp, synthetic construct
  source 1..10: mol_type = other DNA
ctgttttaga

SEQ ID NO: 41043 - DNA, 10 bp, synthetic construct
  source 1..10: mol_type = other DNA
gacatgacag

SEQ ID NO: 41044 - DNA, 10 bp, synthetic construct
  source 1..10: mol_type = other DNA
ggcgatctgt

SEQ ID NO: 41045 - DNA, 10 bp, synthetic construct
  source 1..10: mol_type = other DNA
gatttgggcc

SEQ ID NO: 41046 - DNA, 10 bp, synthetic construct
  source 1..10: mol_type = other DNA
gggatgcctg

SEQ ID NO: 41047 - DNA, 10 bp, synthetic construct
  source 1..10: mol_type = other DNA
gtgatgtgca

SEQ ID NO: 41048 - DNA, 10 bp, synthetic construct
  source 1..10: mol_type = other DNA
catttcggtg

SEQ ID NO: 41049 - DNA, 10 bp, synthetic construct
  source 1..10: mol_type = other DNA
tttctaggga

SEQ ID NO: 41050 - DNA, 10 bp, synthetic construct
  source 1..10: mol_type = other DNA
ggctggcagc

SEQ ID NO: 41051 - DNA, 10 bp, synthetic construct
  source 1..10: mol_type = other DNA
acctgtcctg

SEQ ID NO: 41052 - DNA, 10 bp, synthetic construct
  source 1..10: mol_type = other DNA
tggtccgagg

SEQ ID NO: 41053 - DNA, 10 bp, synthetic construct
  source 1..10: mol_type = other DNA
gcttttaaat

SEQ ID NO: 41054 - DNA, 10 bp, synthetic construct
  source 1..10: mol_type = other DNA
gttctcaacc

SEQ ID NO: 41055 - DNA, 10 bp, synthetic construct
  source 1..10: mol_type = other DNA
caacactttc

SEQ ID NO: 41056 - DNA, 10 bp, synthetic construct
  source 1..10: mol_type = other DNA
gcatggaccc

SEQ ID NO: 41057 - DNA, 10 bp, synthetic construct
  source 1..10: mol_type = other DNA
tttcagcacc

SEQ ID NO: 41058 - DNA, 10 bp, synthetic construct
  source 1..10: mol_type = other DNA
cgaagtcgcc

SEQ ID NO: 41059 - DNA, 10 bp, synthetic construct
  source 1..10: mol_type = other DNA
taagttgtaa

SEQ ID NO: 41060 - DNA, 10 bp, synthetic construct
  source 1..10: mol_type = other DNA
aagaataatc

SEQ ID NO: 41061 - DNA, 10 bp, synthetic construct
  source 1..10: mol_type = other DNA
agctgtactt

SEQ ID NO: 41062 - DNA, 10 bp, synthetic construct
  source 1..10: mol_type = other DNA
ggtgagtaat

SEQ ID NO: 41063 - DNA, 10 bp, synthetic construct
  source 1..10: mol_type = other DNA
ccatttggct

SEQ ID NO: 41064 - DNA, 10 bp, synthetic construct
  source 1..10: mol_type = other DNA
tgttgtacgg

SEQ ID NO: 41065 - DNA, 10 bp, synthetic construct
  source 1..10: mol_type = other DNA
tggcggtgcc

SEQ ID NO: 41066 - DNA, 10 bp, synthetic construct
  source 1..10: mol_type = other DNA
ggacccactc

SEQ ID NO: 41067 - DNA, 10 bp, synthetic construct
  source 1..10: mol_type = other DNA
aggggtgggg

SEQ ID NO: 41068 - DNA, 10 bp, synthetic construct
  source 1..10: mol_type = other DNA
aatcctaggg

SEQ ID NO: 41069 - DNA, 10 bp, synthetic construct
  source 1..10: mol_type = other DNA
tggcagagag

SEQ ID NO: 41070 - DNA, 10 bp, synthetic construct
  source 1..10: mol_type = other DNA
caacgcccag

SEQ ID NO: 41071 - DNA, 10 bp, synthetic construct
  source 1..10: mol_type = other DNA
aagacatacc

SEQ ID NO: 41072 - DNA, 10 bp, synthetic construct
  source 1..10: mol_type = other DNA
ctatctatat

SEQ ID NO: 41073 - DNA, 10 bp, synthetic construct
  source 1..10: mol_type = other DNA
ggaaccaaag

SEQ ID NO: 41074 - DNA, 10 bp, synthetic construct
  source 1..10: mol_type = other DNA
gggtgtgagc

SEQ ID NO: 41075 - DNA, 10 bp, synthetic construct
  source 1..10: mol_type = other DNA
tcacctttcc

SEQ ID NO: 41076 - DNA, 10 bp, synthetic construct
  source 1..10: mol_type = other DNA
atctgctgtt

SEQ ID NO: 41077 - DNA, 10 bp, synthetic construct
  source 1..10: mol_type = other DNA
agatttctgt

SEQ ID NO: 41078 - DNA, 10 bp, synthetic construct
  source 1..10: mol_type = other DNA
ttctcagaat

SEQ ID NO: 41079 - DNA, 10 bp, synthetic construct
  source 1..10: mol_type = other DNA
ctccttcctc

SEQ ID NO: 41080 - DNA, 10 bp, synthetic construct
  source 1..10: mol_type = other DNA
actaccctga

SEQ ID NO: 41081 - DNA, 10 bp, synthetic construct
  source 1..10: mol_type = other DNA
cggaccgagt

SEQ ID NO: 41082 - DNA, 10 bp, synthetic construct
  source 1..10: mol_type = other DNA
ccatcagcac

SEQ ID NO: 41083 - DNA, 10 bp, synthetic construct
  source 1..10: mol_type = other DNA
tagttgctgt

SEQ ID NO: 41084 - DNA, 10 bp, synthetic construct
  source 1..10: mol_type = other DNA
tcggaatgct

SEQ ID NO: 41085 - DNA, 10 bp, synthetic construct
  source 1..10: mol_type = other DNA
gtctgtgaca

SEQ ID NO: 41086 - DNA, 10 bp, synthetic construct
  source 1..10: mol_type = other DNA
aatcgcgtga

SEQ ID NO: 41087 - DNA, 10 bp, synthetic construct
  source 1..10: mol_type = other DNA
ccatccagat

SEQ ID NO: 41088 - DNA, 10 bp, synthetic construct
  source 1..10: mol_type = other DNA
taaggcgtca

SEQ ID NO: 41089 - DNA, 10 bp, synthetic construct
  source 1..10: mol_type = other DNA
agggacacgt

SEQ ID NO: 41090 - DNA, 10 bp, synthetic construct
  source 1..10: mol_type = other DNA
tgccattgct

SEQ ID NO: 41091 - DNA, 10 bp, synthetic construct
  source 1..10: mol_type = other DNA
tcagagaatg

SEQ ID NO: 41092 - DNA, 10 bp, synthetic construct
  source 1..10: mol_type = other DNA
tctggtgcga

SEQ ID NO: 41093 - DNA, 10 bp, synthetic construct
  source 1..10: mol_type = other DNA
ctgtacgggc

SEQ ID NO: 41094 - DNA, 10 bp, synthetic construct
  source 1..10: mol_type = other DNA
ggggagctgg

SEQ ID NO: 41095 - DNA, 10 bp, synthetic construct
  source 1..10: mol_type = other DNA
aggggagcag

SEQ ID NO: 41096 - DNA, 10 bp, synthetic construct
  source 1..10: mol_type = other DNA
agctgtctgc

SEQ ID NO: 41097 - DNA, 10 bp, synthetic construct
  source 1..10: mol_type = other DNA
gggggccccg

SEQ ID NO: 41098 - DNA, 10 bp, synthetic construct
  source 1..10: mol_type = other DNA
accctcggca

SEQ ID NO: 41099 - DNA, 10 bp, synthetic construct
  source 1..10: mol_type = other DNA
ggagcagaag

SEQ ID NO: 41100 - DNA, 10 bp, synthetic construct
  source 1..10: mol_type = other DNA
tgtctgcaga

SEQ ID NO: 41101 - DNA, 10 bp, synthetic construct
  source 1..10: mol_type = other DNA
ggtccagggc

SEQ ID NO: 41102 - DNA, 10 bp, synthetic construct
  source 1..10: mol_type = other DNA
tcctggataa

SEQ ID NO: 41103 - DNA, 10 bp, synthetic construct
  source 1..10: mol_type = other DNA
atcagcgagt

SEQ ID NO: 41104 - DNA, 10 bp, synthetic construct
  source 1..10: mol_type = other DNA
tatgctgaag

SEQ ID NO: 41105 - DNA, 10 bp, synthetic construct
  source 1..10: mol_type = other DNA
acctcaaggg

SEQ ID NO: 41106 - DNA, 10 bp, synthetic construct
  source 1..10: mol_type = other DNA
tctcttgttt

SEQ ID NO: 41107 - DNA, 10 bp, synthetic construct
  source 1..10: mol_type = other DNA
ctcgaggggg

SEQ ID NO: 41108 - DNA, 10 bp, synthetic construct
  source 1..10: mol_type = other DNA
tcaggctggt

SEQ ID NO: 41109 - DNA, 10 bp, synthetic construct
  source 1..10: mol_type = other DNA
cctctgggtg

SEQ ID NO: 41110 - DNA, 10 bp, synthetic construct
  source 1..10: mol_type = other DNA
ggggtgagtg

SEQ ID NO: 41111 - DNA, 10 bp, synthetic construct
  source 1..10: mol_type = other DNA
gctctcggct

SEQ ID NO: 41112 - DNA, 10 bp, synthetic construct
  source 1..10: mol_type = other DNA
tgtccttcgc

SEQ ID NO: 41113 - DNA, 10 bp, synthetic construct
  source 1..10: mol_type = other DNA
ctgcatgttg

SEQ ID NO: 41114 - DNA, 10 bp, synthetic construct
  source 1..10: mol_type = other DNA
tgtgtggtgg

SEQ ID NO: 41115 - DNA, 10 bp, synthetic construct
  source 1..10: mol_type = other DNA
gagccatggg

SEQ ID NO: 41116 - DNA, 10 bp, synthetic construct
  source 1..10: mol_type = other DNA
ctcagagtcc

SEQ ID NO: 41117 - DNA, 10 bp, synthetic construct
  source 1..10: mol_type = other DNA
gagggaccac

SEQ ID NO: 41118 - DNA, 10 bp, synthetic construct
  source 1..10: mol_type = other DNA
ccaaggccat

SEQ ID NO: 41119 - DNA, 10 bp, synthetic construct
  source 1..10: mol_type = other DNA
atgcttggag

SEQ ID NO: 41120 - DNA, 10 bp, synthetic construct
  source 1..10: mol_type = other DNA
tgtgtctttg

SEQ ID NO: 41121 - DNA, 10 bp, synthetic construct
  source 1..10: mol_type = other DNA
tgtgttcagt

SEQ ID NO: 41122 - DNA, 10 bp, synthetic construct
  source 1..10: mol_type = other DNA
ttgttggaat

SEQ ID NO: 41123 - DNA, 10 bp, synthetic construct
  source 1..10: mol_type = other DNA
ctacagatcg

SEQ ID NO: 41124 - DNA, 10 bp, synthetic construct
  source 1..10: mol_type = other DNA
gcccgtcttc

SEQ ID NO: 41125 - DNA, 10 bp, synthetic construct
  source 1..10: mol_type = other DNA
tagtgtcccc

SEQ ID NO: 41126 - DNA, 10 bp, synthetic construct
  source 1..10: mol_type = other DNA
atgacacaat

SEQ ID NO: 41127 - DNA, 10 bp, synthetic construct
  source 1..10: mol_type = other DNA
ctgggaacag

SEQ ID NO: 41128 - DNA, 10 bp, synthetic construct
  source 1..10: mol_type = other DNA
cactgtctca

SEQ ID NO: 41129 - DNA, 10 bp, synthetic construct
  source 1..10: mol_type = other DNA
ggaggccttg

SEQ ID NO: 41130 - DNA, 10 bp, synthetic construct
  source 1..10: mol_type = other DNA
aactgtccct

SEQ ID NO: 41131 - DNA, 10 bp, synthetic construct
  source 1..10: mol_type = other DNA
ttcctcagga

SEQ ID NO: 41132 - DNA, 10 bp, synthetic construct
  source 1..10: mol_type = other DNA
ggtgcaggcc

SEQ ID NO: 41133 - DNA, 10 bp, synthetic construct
  source 1..10: mol_type = other DNA
tcctgggtcc

SEQ ID NO: 41134 - DNA, 10 bp, synthetic construct
  source 1..10: mol_type = other DNA
ttctcctcgg

SEQ ID NO: 41135 - DNA, 10 bp, synthetic construct
  source 1..10: mol_type = other DNA
tgtctccaca

SEQ ID NO: 41136 - DNA, 10 bp, synthetic construct
  source 1..10: mol_type = other DNA
accgttcaat

SEQ ID NO: 41137 - DNA, 10 bp, synthetic construct
  source 1..10: mol_type = other DNA
cccttctcct

SEQ ID NO: 41138 - DNA, 10 bp, synthetic construct
  source 1..10: mol_type = other DNA
ctgtttcttc

SEQ ID NO: 41139 - DNA, 10 bp, synthetic construct
  source 1..10: mol_type = other DNA
ttggagctgg

SEQ ID NO: 41140 - DNA, 10 bp, synthetic construct
  source 1..10: mol_type = other DNA
gctgccgctg

SEQ ID NO: 41141 - DNA, 10 bp, synthetic construct
  source 1..10: mol_type = other DNA
gttggagctg

SEQ ID NO: 41142 - DNA, 10 bp, synthetic construct
  source 1..10: mol_type = other DNA
agctgccgct

SEQ ID NO: 41143 - DNA, 10 bp, synthetic construct
  source 1..10: mol_type = other DNA
ttcccggttt

SEQ ID NO: 41144 - DNA, 10 bp, synthetic construct
  source 1..10: mol_type = other DNA
attgagaatc

SEQ ID NO: 41145 - DNA, 10 bp, synthetic construct
  source 1..10: mol_type = other DNA
atgtttatta

SEQ ID NO: 41146 - DNA, 10 bp, synthetic construct
  source 1..10: mol_type = other DNA
tttgcccaga

SEQ ID NO: 41147 - DNA, 10 bp, synthetic construct
  source 1..10: mol_type = other DNA
ggccgccctg

SEQ ID NO: 41148 - DNA, 10 bp, synthetic construct
  source 1..10: mol_type = other DNA
aagggctgaa

SEQ ID NO: 41149 - DNA, 10 bp, synthetic construct
  source 1..10: mol_type = other DNA
tgtccttaac

SEQ ID NO: 41150 - DNA, 10 bp, synthetic construct
  source 1..10: mol_type = other DNA
aagaggttga

SEQ ID NO: 41151 - DNA, 10 bp, synthetic construct
  source 1..10: mol_type = other DNA
ataacatttg

SEQ ID NO: 41152 - DNA, 10 bp, synthetic construct
  source 1..10: mol_type = other DNA
ggtgaacctg

SEQ ID NO: 41153 - DNA, 10 bp, synthetic construct
  source 1..10: mol_type = other DNA
ctgggcaacc

SEQ ID NO: 41154 - DNA, 10 bp, synthetic construct
  source 1..10: mol_type = other DNA
acaccagaca

SEQ ID NO: 41155 - DNA, 10 bp, synthetic construct
  source 1..10: mol_type = other DNA
agcttctcac

SEQ ID NO: 41156 - DNA, 10 bp, synthetic construct
  source 1..10: mol_type = other DNA
ttccggagca

SEQ ID NO: 41157 - DNA, 10 bp, synthetic construct
  source 1..10: mol_type = other DNA
gcaaaagatg

SEQ ID NO: 41158 - DNA, 10 bp, synthetic construct
  source 1..10: mol_type = other DNA
gggcagctct

SEQ ID NO: 41159 - DNA, 10 bp, synthetic construct
  source 1..10: mol_type = other DNA
agagctgctg

SEQ ID NO: 41160 - DNA, 10 bp, synthetic construct
  source 1..10: mol_type = other DNA
tgtggttgct

SEQ ID NO: 41161 - DNA, 10 bp, synthetic construct
  source 1..10: mol_type = other DNA
acaccatcca

SEQ ID NO: 41162 - DNA, 10 bp, synthetic construct
  source 1..10: mol_type = other DNA
tttcatgcag

SEQ ID NO: 41163 - DNA, 10 bp, synthetic construct
  source 1..10: mol_type = other DNA
tccagcatcc

SEQ ID NO: 41164 - DNA, 10 bp, synthetic construct
  source 1..10: mol_type = other DNA
cactcgcatc

SEQ ID NO: 41165 - DNA, 10 bp, synthetic construct
  source 1..10: mol_type = other DNA
gccctgcata

SEQ ID NO: 41166 - DNA, 10 bp, synthetic construct
  source 1..10: mol_type = other DNA
actggctgat

SEQ ID NO: 41167 - DNA, 10 bp, synthetic construct
  source 1..10: mol_type = other DNA
ggccccaggc

SEQ ID NO: 41168 - DNA, 10 bp, synthetic construct
  source 1..10: mol_type = other DNA
tgatgcgcga

SEQ ID NO: 41169 - DNA, 10 bp, synthetic construct
  source 1..10: mol_type = other DNA
cactcaccgc

SEQ ID NO: 41170 - DNA, 10 bp, synthetic construct
  source 1..10: mol_type = other DNA
ggaaccagcg

SEQ ID NO: 41171 - DNA, 10 bp, synthetic construct
  source 1..10: mol_type = other DNA
atgagagtga

SEQ ID NO: 41172 - DNA, 10 bp, synthetic construct
  source 1..10: mol_type = other DNA
gaaaaccatg

SEQ ID NO: 41173 - DNA, 10 bp, synthetic construct
  source 1..10: mol_type = other DNA
cgcagctcgg

SEQ ID NO: 41174 - DNA, 10 bp, synthetic construct
  source 1..10: mol_type = other DNA
gagatgttca

SEQ ID NO: 41175 - DNA, 10 bp, synthetic construct
  source 1..10: mol_type = other DNA
attttgtctg

SEQ ID NO: 41176 - DNA, 10 bp, synthetic construct
  source 1..10: mol_type = other DNA
gacgtcatgc

SEQ ID NO: 41177 - DNA, 10 bp, synthetic construct
  source 1..10: mol_type = other DNA
agttagaaga

SEQ ID NO: 41178 - DNA, 10 bp, synthetic construct
  source 1..10: mol_type = other DNA
ggccagaagg

SEQ ID NO: 41179 - DNA, 10 bp, synthetic construct
  source 1..10: mol_type = other DNA
gtcttgcaga

SEQ ID NO: 41180 - DNA, 10 bp, synthetic construct
  source 1..10: mol_type = other DNA
agcggggaca

SEQ ID NO: 41181 - DNA, 10 bp, synthetic construct
  source 1..10: mol_type = other DNA
tccacggtga

SEQ ID NO: 41182 - DNA, 10 bp, synthetic construct
  source 1..10: mol_type = other DNA
cttgctgtag

SEQ ID NO: 41183 - DNA, 10 bp, synthetic construct
  source 1..10: mol_type = other DNA
tgcccttgat

SEQ ID NO: 41184 - DNA, 10 bp, synthetic construct
  source 1..10: mol_type = other DNA
aagagaccag

SEQ ID NO: 41185 - DNA, 10 bp, synthetic construct
  source 1..10: mol_type = other DNA
tgaaaggaaa

SEQ ID NO: 41186 - DNA, 10 bp, synthetic construct
  source 1..10: mol_type = other DNA
tagtgaaaat

SEQ ID NO: 41187 - DNA, 10 bp, synthetic construct
  source 1..10: mol_type = other DNA
ggattatatg

SEQ ID NO: 41188 - DNA, 10 bp, synthetic construct
  source 1..10: mol_type = other DNA
ccagaactcc

SEQ ID NO: 41189 - DNA, 10 bp, synthetic construct
  source 1..10: mol_type = other DNA
gcggtccact

SEQ ID NO: 41190 - DNA, 10 bp, synthetic construct
  source 1..10: mol_type = other DNA
cgcccagcat

SEQ ID NO: 41191 - DNA, 10 bp, synthetic construct
  source 1..10: mol_type = other DNA
gagtcaggga

SEQ ID NO: 41192 - DNA, 10 bp, synthetic construct
  source 1..10: mol_type = other DNA
gatcttcaga

SEQ ID NO: 41193 - DNA, 10 bp, synthetic construct
  source 1..10: mol_type = other DNA
ttctcgctgg

SEQ ID NO: 41194 - DNA, 10 bp, synthetic construct
  source 1..10: mol_type = other DNA
gctcagcttc

SEQ ID NO: 41195 - DNA, 10 bp, synthetic construct
  source 1..10: mol_type = other DNA
gtggtgtcca

SEQ ID NO: 41196 - DNA, 10 bp, synthetic construct
  source 1..10: mol_type = other DNA
gccggtctgg

SEQ ID NO: 41197 - DNA, 10 bp, synthetic construct
  source 1..10: mol_type = other DNA
gtgtccatgc

SEQ ID NO: 41198 - DNA, 10 bp, synthetic construct
  source 1..10: mol_type = other DNA
ggtctggaca

SEQ ID NO: 41199 - DNA, 10 bp, synthetic construct
  source 1..10: mol_type = other DNA
cagcagaggt

SEQ ID NO: 41200 - DNA, 10 bp, synthetic construct
  source 1..10: mol_type = other DNA
taatggggaa

SEQ ID NO: 41201 - DNA, 10 bp, synthetic construct
  source 1..10: mol_type = other DNA
ttatacagat

SEQ ID NO: 41202 - DNA, 10 bp, synthetic construct
  source 1..10: mol_type = other DNA
gcaagatatg

SEQ ID NO: 41203 - DNA, 10 bp, synthetic construct
  source 1..10: mol_type = other DNA
caggggatag

SEQ ID NO: 41204 - DNA, 10 bp, synthetic construct
  source 1..10: mol_type = other DNA
ggggcggcag

SEQ ID NO: 41205 - DNA, 10 bp, synthetic construct
  source 1..10: mol_type = other DNA
cttgttgtaa

SEQ ID NO: 41206 - DNA, 10 bp, synthetic construct
  source 1..10: mol_type = other DNA
cggagaagag

SEQ ID NO: 41207 - DNA, 10 bp, synthetic construct
  source 1..10: mol_type = other DNA
tccatccaga

SEQ ID NO: 41208 - DNA, 10 bp, synthetic construct
  source 1..10: mol_type = other DNA
cagtggctaa

SEQ ID NO: 41209 - DNA, 10 bp, synthetic construct
  source 1..10: mol_type = other DNA
cccttgatga

SEQ ID NO: 41210 - DNA, 10 bp, synthetic construct
  source 1..10: mol_type = other DNA
gtccctggca

SEQ ID NO: 41211 - DNA, 10 bp, synthetic construct
  source 1..10: mol_type = other DNA
atgtgcttac

SEQ ID NO: 41212 - DNA, 10 bp, synthetic construct
  source 1..10: mol_type = other DNA
ttgggaactt

SEQ ID NO: 41213 - DNA, 10 bp, synthetic construct
  source 1..10: mol_type = other DNA
acgcattatg

SEQ ID NO: 41214 - DNA, 10 bp, synthetic construct
  source 1..10: mol_type = other DNA
tcattcattg

SEQ ID NO: 41215 - DNA, 10 bp, synthetic construct
  source 1..10: mol_type = other DNA
ggaggccttt

SEQ ID NO: 41216 - DNA, 10 bp, synthetic construct
  source 1..10: mol_type = other DNA
cccgcttcat

SEQ ID NO: 41217 - DNA, 10 bp, synthetic construct
  source 1..10: mol_type = other DNA
ggataagaca

SEQ ID NO: 41218 - DNA, 10 bp, synthetic construct
  source 1..10: mol_type = other DNA
tcacaccaga

SEQ ID NO: 41219 - DNA, 10 bp, synthetic construct
  source 1..10: mol_type = other DNA
gaagatgtga

SEQ ID NO: 41220 - DNA, 10 bp, synthetic construct
  source 1..10: mol_type = other DNA
acccaaaccc

SEQ ID NO: 41221 - DNA, 10 bp, synthetic construct
  source 1..10: mol_type = other DNA
cataggaaaa

SEQ ID NO: 41222 - DNA, 10 bp, synthetic construct
  source 1..10: mol_type = other DNA
ttatactgaa

SEQ ID NO: 41223 - DNA, 10 bp, synthetic construct
  source 1..10: mol_type = other DNA
ttgacattgc

SEQ ID NO: 41224 - DNA, 10 bp, synthetic construct
  source 1..10: mol_type = other DNA
tcattcaaaa

SEQ ID NO: 41225 - DNA, 10 bp, synthetic construct
  source 1..10: mol_type = other DNA
ctgctcacca

SEQ ID NO: 41226 - DNA, 10 bp, synthetic construct
  source 1..10: mol_type = other DNA
tgcccttcca

SEQ ID NO: 41227 - DNA, 10 bp, synthetic construct
  source 1..10: mol_type = other DNA
agctaatgaa

SEQ ID NO: 41228 - DNA, 10 bp, synthetic construct
  source 1..10: mol_type = other DNA
acgacgctat

SEQ ID NO: 41229 - DNA, 10 bp, synthetic construct
  source 1..10: mol_type = other DNA
aagtgctgca

SEQ ID NO: 41230 - DNA, 10 bp, synthetic construct
  source 1..10: mol_type = other DNA
cttctcagct

SEQ ID NO: 41231 - DNA, 10 bp, synthetic construct
  source 1..10: mol_type = other DNA
ctggcaggag

SEQ ID NO: 41232 - DNA, 10 bp, synthetic construct
  source 1..10: mol_type = other DNA
tcctgaaaac

SEQ ID NO: 41233 - DNA, 10 bp, synthetic construct
  source 1..10: mol_type = other DNA
gattgtcagt

SEQ ID NO: 41234 - DNA, 10 bp, synthetic construct
  source 1..10: mol_type = other DNA
tctggctgaa

SEQ ID NO: 41235 - DNA, 10 bp, synthetic construct
  source 1..10: mol_type = other DNA
accaggtttt

SEQ ID NO: 41236 - DNA, 10 bp, synthetic construct
  source 1..10: mol_type = other DNA
ggtaaggtgg

SEQ ID NO: 41237 - DNA, 10 bp, synthetic construct
  source 1..10: mol_type = other DNA
cctgcaaacc

SEQ ID NO: 41238 - DNA, 10 bp, synthetic construct
  source 1..10: mol_type = other DNA
ggacccaaca

SEQ ID NO: 41239 - DNA, 10 bp, synthetic construct
  source 1..10: mol_type = other DNA
gctcttcatc

SEQ ID NO: 41240 - DNA, 10 bp, synthetic construct
  source 1..10: mol_type = other DNA
gagcggacag

SEQ ID NO: 41241 - DNA, 10 bp, synthetic construct
  source 1..10: mol_type = other DNA
cgcgagggca

SEQ ID NO: 41242 - DNA, 10 bp, synthetic construct
  source 1..10: mol_type = other DNA
ggccgagggc

SEQ ID NO: 41243 - DNA, 10 bp, synthetic construct
  source 1..10: mol_type = other DNA
tttgagaagg

SEQ ID NO: 41244 - DNA, 10 bp, synthetic construct
  source 1..10: mol_type = other DNA
ggaacagctc

SEQ ID NO: 41245 - DNA, 10 bp, synthetic construct
  source 1..10: mol_type = other DNA
ttccatgtcc

SEQ ID NO: 41246 - DNA, 10 bp, synthetic construct
  source 1..10: mol_type = other DNA
ataaggtgtg

SEQ ID NO: 41247 - DNA, 10 bp, synthetic construct
  source 1..10: mol_type = other DNA
cctccaggga

SEQ ID NO: 41248 - DNA, 10 bp, synthetic construct
  source 1..10: mol_type = other DNA
atccagacgg

SEQ ID NO: 41249 - DNA, 10 bp, synthetic construct
  source 1..10: mol_type = other DNA
aggccccgcc

SEQ ID NO: 41250 - DNA, 10 bp, synthetic construct
  source 1..10: mol_type = other DNA
gcctcccggg

SEQ ID NO: 41251 - DNA, 10 bp, synthetic construct
  source 1..10: mol_type = other DNA
ctgtgctgct

SEQ ID NO: 41252 - DNA, 10 bp, synthetic construct
  source 1..10: mol_type = other DNA
agaatgccag

SEQ ID NO: 41253 - DNA, 10 bp, synthetic construct
  source 1..10: mol_type = other DNA
gaaattgtaa

SEQ ID NO: 41254 - DNA, 10 bp, synthetic construct
  source 1..10: mol_type = other DNA
attttccttt

SEQ ID NO: 41255 - DNA, 10 bp, synthetic construct
  source 1..10: mol_type = other DNA
actgcactcc

SEQ ID NO: 41256 - DNA, 10 bp, synthetic construct
  source 1..10: mol_type = other DNA
ccacccccct

SEQ ID NO: 41257 - DNA, 10 bp, synthetic construct
  source 1..10: mol_type = other DNA
ccgccccccc

SEQ ID NO: 41258 - DNA, 10 bp, synthetic construct
  source 1..10: mol_type = other DNA
ggtctccggc

SEQ ID NO: 41259 - DNA, 10 bp, synthetic construct
  source 1..10: mol_type = other DNA
tccagtctta

SEQ ID NO: 41260 - DNA, 10 bp, synthetic construct
  source 1..10: mol_type = other DNA
agcctggaat

SEQ ID NO: 41261 - DNA, 10 bp, synthetic construct
  source 1..10: mol_type = other DNA
tggaagagac

SEQ ID NO: 41262 - DNA, 10 bp, synthetic construct
  source 1..10: mol_type = other DNA
ttcacactgg

SEQ ID NO: 41263 - DNA, 10 bp, synthetic construct
  source 1..10: mol_type = other DNA
gccgcaaagg

SEQ ID NO: 41264 - DNA, 10 bp, synthetic construct
  source 1..10: mol_type = other DNA
aagcatctaa

SEQ ID NO: 41265 - DNA, 10 bp, synthetic construct
  source 1..10: mol_type = other DNA
ggcgggggcc

SEQ ID NO: 41266 - DNA, 10 bp, synthetic construct
  source 1..10: mol_type = other DNA
gggtgggggc

SEQ ID NO: 41267 - DNA, 10 bp, synthetic construct
  source 1..10: mol_type = other DNA
tcctcgatat

SEQ ID NO: 41268 - DNA, 10 bp, synthetic construct
  source 1..10: mol_type = other DNA
gtctctcctg

SEQ ID NO: 41269 - DNA, 10 bp, synthetic construct
  source 1..10: mol_type = other DNA
acatgccagg

SEQ ID NO: 41270 - DNA, 10 bp, synthetic construct
  source 1..10: mol_type = other DNA
gaagctccac

SEQ ID NO: 41271 - DNA, 10 bp, synthetic construct
  source 1..10: mol_type = other DNA
tattcacagg

SEQ ID NO: 41272 - DNA, 10 bp, synthetic construct
  source 1..10: mol_type = other DNA
atttccctgc

SEQ ID NO: 41273 - DNA, 10 bp, synthetic construct
  source 1..10: mol_type = other DNA
atgggatgac

SEQ ID NO: 41274 - DNA, 10 bp, synthetic construct
  source 1..10: mol_type = other DNA
cagcctgtcc

SEQ ID NO: 41275 - DNA, 10 bp, synthetic construct
  source 1..10: mol_type = other DNA
atgagaaaac

SEQ ID NO: 41276 - DNA, 10 bp, synthetic construct
  source 1..10: mol_type = other DNA
agaaagccag

SEQ ID NO: 41277 - DNA, 10 bp, synthetic construct
  source 1..10: mol_type = other DNA
accaaacagc

SEQ ID NO: 41278 - DNA, 10 bp, synthetic construct
  source 1..10: mol_type = other DNA
gcagactggg

SEQ ID NO: 41279 - DNA, 10 bp, synthetic construct
  source 1..10: mol_type = other DNA
aacgacaaga

SEQ ID NO: 41280 - DNA, 10 bp, synthetic construct
  source 1..10: mol_type = other DNA
ctggcgttga

SEQ ID NO: 41281 - DNA, 10 bp, synthetic construct
  source 1..10: mol_type = other DNA
tccaccacat

SEQ ID NO: 41282 - DNA, 10 bp, synthetic construct
  source 1..10: mol_type = other DNA
tgactcgtaa

SEQ ID NO: 41283 - DNA, 10 bp, synthetic construct
  source 1..10: mol_type = other DNA
acgatgtctt

SEQ ID NO: 41284 - DNA, 10 bp, synthetic construct
  source 1..10: mol_type = other DNA
ctcagatgca

SEQ ID NO: 41285 - DNA, 10 bp, synthetic construct
  source 1..10: mol_type = other DNA
caggtggctt

SEQ ID NO: 41286 - DNA, 10 bp, synthetic construct
  source 1..10: mol_type = other DNA
ttaggttctg

SEQ ID NO: 41287 - DNA, 10 bp, synthetic construct
  source 1..10: mol_type = other DNA
gctggagctc

SEQ ID NO: 41288 - DNA, 10 bp, synthetic construct
  source 1..10: mol_type = other DNA
cacagcagca

SEQ ID NO: 41289 - DNA, 10 bp, synthetic construct
  source 1..10: mol_type = other DNA
tgatactgga

SEQ ID NO: 41290 - DNA, 10 bp, synthetic construct
  source 1..10: mol_type = other DNA
atgacaaaaa

SEQ ID NO: 41291 - DNA, 10 bp, synthetic construct
  source 1..10: mol_type = other DNA
ccttggctgg

SEQ ID NO: 41292 - DNA, 10 bp, synthetic construct
  source 1..10: mol_type = other DNA
ctctgggcta

SEQ ID NO: 41293 - DNA, 10 bp, synthetic construct
  source 1..10: mol_type = other DNA
ctatgcttat

SEQ ID NO: 41294 - DNA, 10 bp, synthetic construct
  source 1..10: mol_type = other DNA
actcgaactc

SEQ ID NO: 41295 - DNA, 10 bp, synthetic construct
  source 1..10: mol_type = other DNA
ccgtaggcct

SEQ ID NO: 41296 - DNA, 10 bp, synthetic construct
  source 1..10: mol_type = other DNA
gctgtaggcc

SEQ ID NO: 41297 - DNA, 10 bp, synthetic construct
  source 1..10: mol_type = other DNA
gctgaatgtc

SEQ ID NO: 41298 - DNA, 10 bp, synthetic construct
  source 1..10: mol_type = other DNA
ctgtacatgg

SEQ ID NO: 41299 - DNA, 10 bp, synthetic construct
  source 1..10: mol_type = other DNA
ggagacgata

SEQ ID NO: 41300 - DNA, 10 bp, synthetic construct
  source 1..10: mol_type = other DNA
gccagaatcc

SEQ ID NO: 41301 - DNA, 10 bp, synthetic construct
  source 1..10: mol_type = other DNA
cccactgcag

SEQ ID NO: 41302 - DNA, 10 bp, synthetic construct
  source 1..10: mol_type = other DNA
cttcagctgg

SEQ ID NO: 41303 - DNA, 10 bp, synthetic construct
  source 1..10: mol_type = other DNA
tttgtatctc

SEQ ID NO: 41304 - DNA, 10 bp, synthetic construct
  source 1..10: mol_type = other DNA
atcttcaccg

SEQ ID NO: 41305 - DNA, 10 bp, synthetic construct
  source 1..10: mol_type = other DNA
gtcgggagcc

SEQ ID NO: 41306 - DNA, 10 bp, synthetic construct
  source 1..10: mol_type = other DNA
cctgtatatc

SEQ ID NO: 41307 - DNA, 10 bp, synthetic construct
  source 1..10: mol_type = other DNA
cccacaaaca

SEQ ID NO: 41308 - DNA, 10 bp, synthetic construct
  source 1..10: mol_type = other DNA
tcccacgtct

SEQ ID NO: 41309 - DNA, 10 bp, synthetic construct
  source 1..10: mol_type = other DNA
caccctgctg

SEQ ID NO: 41310 - DNA, 10 bp, synthetic construct
  source 1..10: mol_type = other DNA
aactcggtga

SEQ ID NO: 41311 - DNA, 10 bp, synthetic construct
  source 1..10: mol_type = other DNA
gccaagcacc

SEQ ID NO: 41312 - DNA, 10 bp, synthetic construct
  source 1..10: mol_type = other DNA
ctggctcaga

SEQ ID NO: 41313 - DNA, 10 bp, synthetic construct
  source 1..10: mol_type = other DNA
cgttggcaaa

SEQ ID NO: 41314 - DNA, 10 bp, synthetic construct
  source 1..10: mol_type = other DNA
atgatgactg

SEQ ID NO: 41315 - DNA, 10 bp, synthetic construct
  source 1..10: mol_type = other DNA
ggtgctgggg

SEQ ID NO: 41316 - DNA, 10 bp, synthetic construct
  source 1..10: mol_type = other DNA
aaccaatgga

SEQ ID NO: 41317 - DNA, 10 bp, synthetic construct
  source 1..10: mol_type = other DNA
gaagccccag

SEQ ID NO: 41318 - DNA, 10 bp, synthetic construct
  source 1..10: mol_type = other DNA
cggccatgca

SEQ ID NO: 41319 - DNA, 10 bp, synthetic construct
  source 1..10: mol_type = other DNA
gcatctgcat

SEQ ID NO: 41320 - DNA, 10 bp, synthetic construct
  source 1..10: mol_type = other DNA
tgaggcttcc

SEQ ID NO: 41321 - DNA, 10 bp, synthetic construct
  source 1..10: mol_type = other DNA
attttgcaga

SEQ ID NO: 41322 - DNA, 10 bp, synthetic construct
  source 1..10: mol_type = other DNA
attctgaaaa

SEQ ID NO: 41323 - DNA, 10 bp, synthetic construct
  source 1..10: mol_type = other DNA
acaggaagag

SEQ ID NO: 41324 - DNA, 10 bp, synthetic construct
  source 1..10: mol_type = other DNA
ggtggtgtga

SEQ ID NO: 41325 - DNA, 10 bp, synthetic construct
  source 1..10: mol_type = other DNA
ccccaggcct

SEQ ID NO: 41326 - DNA, 10 bp, synthetic construct
  source 1..10: mol_type = other DNA
catgggtggg

SEQ ID NO: 41327 - DNA, 10 bp, synthetic construct
  source 1..10: mol_type = other DNA
ttctactggc

SEQ ID NO: 41328 - DNA, 10 bp, synthetic construct
  source 1..10: mol_type = other DNA
tgacaaagac

SEQ ID NO: 41329 - DNA, 10 bp, synthetic construct
  source 1..10: mol_type = other DNA
tgaatcgtga

SEQ ID NO: 41330 - DNA, 10 bp, synthetic construct
  source 1..10: mol_type = other DNA
catcacatag

SEQ ID NO: 41331 - DNA, 10 bp, synthetic construct
  source 1..10: mol_type = other DNA
acggcagtag

SEQ ID NO: 41332 - DNA, 10 bp, synthetic construct
  source 1..10: mol_type = other DNA
agaagatgtt

SEQ ID NO: 41333 - DNA, 10 bp, synthetic construct
  source 1..10: mol_type = other DNA
tttccggaga

SEQ ID NO: 41334 - DNA, 10 bp, synthetic construct
  source 1..10: mol_type = other DNA
ctcagagctg

SEQ ID NO: 41335 - DNA, 10 bp, synthetic construct
  source 1..10: mol_type = other DNA
agcttcgatg

SEQ ID NO: 41336 - DNA, 10 bp, synthetic construct
  source 1..10: mol_type = other DNA
gaatgcttcg

SEQ ID NO: 41337 - DNA, 10 bp, synthetic construct
  source 1..10: mol_type = other DNA
ggtgacattt

SEQ ID NO: 41338 - DNA, 10 bp, synthetic construct
  source 1..10: mol_type = other DNA
agtctcctca

SEQ ID NO: 41339 - DNA, 10 bp, synthetic construct
  source 1..10: mol_type = other DNA
caggctctgg

SEQ ID NO: 41340 - DNA, 10 bp, synthetic construct
  source 1..10: mol_type = other DNA
gcagtacatg

SEQ ID NO: 41341 - DNA, 10 bp, synthetic construct
  source 1..10: mol_type = other DNA
tgctgggttg

SEQ ID NO: 41342 - DNA, 10 bp, synthetic construct
  source 1..10: mol_type = other DNA
acaggaactg

SEQ ID NO: 41343 - DNA, 10 bp, synthetic construct
  source 1..10: mol_type = other DNA
cgctccaggc

SEQ ID NO: 41344 - DNA, 10 bp, synthetic construct
  source 1..10: mol_type = other DNA
tcccgtggac

SEQ ID NO: 41345 - DNA, 10 bp, synthetic construct
  source 1..10: mol_type = other DNA
ggacatcccg

SEQ ID NO: 41346 - DNA, 10 bp, synthetic construct
  source 1..10: mol_type = other DNA
ggagcgccac

SEQ ID NO: 41347 - DNA, 10 bp, synthetic construct
  source 1..10: mol_type = other DNA
atacatgttt

SEQ ID NO: 41348 - DNA, 10 bp, synthetic construct
  source 1..10: mol_type = other DNA
taaatgttgc

SEQ ID NO: 41349 - DNA, 10 bp, synthetic construct
  source 1..10: mol_type = other DNA
aggtgtctgg

SEQ ID NO: 41350 - DNA, 10 bp, synthetic construct
  source 1..10: mol_type = other DNA
gagctttagc

SEQ ID NO: 41351 - DNA, 10 bp, synthetic construct
  source 1..10: mol_type = other DNA
gagaggtcca

SEQ ID NO: 41352 - DNA, 10 bp, synthetic construct
  source 1..10: mol_type = other DNA
ggtgccctac

SEQ ID NO: 41353 - DNA, 10 bp, synthetic construct
  source 1..10: mol_type = other DNA
cctgccctct

SEQ ID NO: 41354 - DNA, 10 bp, synthetic construct
  source 1..10: mol_type = other DNA
ggccaggtgc

SEQ ID NO: 41355 - DNA, 10 bp, synthetic construct
  source 1..10: mol_type = other DNA
cttatgcttt

SEQ ID NO: 41356 - DNA, 10 bp, synthetic construct
  source 1..10: mol_type = other DNA
ttctcatccc

SEQ ID NO: 41357 - DNA, 10 bp, synthetic construct
  source 1..10: mol_type = other DNA
atgctttctt

SEQ ID NO: 41358 - DNA, 10 bp, synthetic construct
  source 1..10: mol_type = other DNA
tcatcccagt

SEQ ID NO: 41359 - DNA, 10 bp, synthetic construct
  source 1..10: mol_type = other DNA
ccgtaatttc

SEQ ID NO: 41360 - DNA, 10 bp, synthetic construct
  source 1..10: mol_type = other DNA
ttcgctggga

SEQ ID NO: 41361 - DNA, 10 bp, synthetic construct
  source 1..10: mol_type = other DNA
tgagggagaa

SEQ ID NO: 41362 - DNA, 10 bp, synthetic construct
  source 1..10: mol_type = other DNA
aaggaaggct

SEQ ID NO: 41363 - DNA, 10 bp, synthetic construct
  source 1..10: mol_type = other DNA
aaggtgccct

SEQ ID NO: 41364 - DNA, 10 bp, synthetic construct
  source 1..10: mol_type = other DNA
catcgtgcgc

SEQ ID NO: 41365 - DNA, 10 bp, synthetic construct
  source 1..10: mol_type = other DNA
ggaaagcaag

SEQ ID NO: 41366 - DNA, 10 bp, synthetic construct
  source 1..10: mol_type = other DNA
cggcaaagct

SEQ ID NO: 41367 - DNA, 10 bp, synthetic construct
  source 1..10: mol_type = other DNA
tgctcctcta

SEQ ID NO: 41368 - DNA, 10 bp, synthetic construct
  source 1..10: mol_type = other DNA
tcttactaca

SEQ ID NO: 41369 - DNA, 10 bp, synthetic construct
  source 1..10: mol_type = other DNA
ggatgaggac

SEQ ID NO: 41370 - DNA, 10 bp, synthetic construct
  source 1..10: mol_type = other DNA
ccagctgccc

SEQ ID NO: 41371 - DNA, 10 bp, synthetic construct
  source 1..10: mol_type = other DNA
accttctggc

SEQ ID NO: 41372 - DNA, 10 bp, synthetic construct
  source 1..10: mol_type = other DNA
tgggaggcca

SEQ ID NO: 41373 - DNA, 10 bp, synthetic construct
  source 1..10: mol_type = other DNA
gcgtatttgg

SEQ ID NO: 41374 - DNA, 10 bp, synthetic construct
  source 1..10: mol_type = other DNA
tccatggaat

SEQ ID NO: 41375 - DNA, 10 bp, synthetic construct
  source 1..10: mol_type = other DNA
atctcactac

SEQ ID NO: 41376 - DNA, 10 bp, synthetic construct
  source 1..10: mol_type = other DNA
ggcacagcag

SEQ ID NO: 41377 - DNA, 10 bp, synthetic construct
  source 1..10: mol_type = other DNA
cttaggcaag

SEQ ID NO: 41378 - DNA, 10 bp, synthetic construct
  source 1..10: mol_type = other DNA
gcaaaggtcg

SEQ ID NO: 41379 - DNA, 10 bp, synthetic construct
  source 1..10: mol_type = other DNA
ggacacccca

SEQ ID NO: 41380 - DNA, 10 bp, synthetic construct
  source 1..10: mol_type = other DNA
ccggacccac

SEQ ID NO: 41381 - DNA, 10 bp, synthetic construct
  source 1..10: mol_type = other DNA
ccggacaccc

SEQ ID NO: 41382 - DNA, 10 bp, synthetic construct
  source 1..10: mol_type = other DNA
tcggtcttcc

SEQ ID NO: 41383 - DNA, 10 bp, synthetic construct
  source 1..10: mol_type = other DNA
ggagctcaac

SEQ ID NO: 41384 - DNA, 10 bp, synthetic construct
  source 1..10: mol_type = other DNA
caggagacct

SEQ ID NO: 41385 - DNA, 10 bp, synthetic construct
  source 1..10: mol_type = other DNA
tgcagatatt

SEQ ID NO: 41386 - DNA, 10 bp, synthetic construct
  source 1..10: mol_type = other DNA
catggtgtct

SEQ ID NO: 41387 - DNA, 10 bp, synthetic construct
  source 1..10: mol_type = other DNA
acacctcaga

SEQ ID NO: 41388 - DNA, 10 bp, synthetic construct
  source 1..10: mol_type = other DNA
tcaggtgacc

SEQ ID NO: 41389 - DNA, 10 bp, synthetic construct
  source 1..10: mol_type = other DNA
tctaccgaga

SEQ ID NO: 41390 - DNA, 10 bp, synthetic construct
  source 1..10: mol_type = other DNA
acaggcgcca

SEQ ID NO: 41391 - DNA, 10 bp, synthetic construct
  source 1..10: mol_type = other DNA
ccccccgccg

SEQ ID NO: 41392 - DNA, 10 bp, synthetic construct
  source 1..10: mol_type = other DNA
gcctcgacgg

SEQ ID NO: 41393 - DNA, 10 bp, synthetic construct
  source 1..10: mol_type = other DNA
gccgttccac

SEQ ID NO: 41394 - DNA, 10 bp, synthetic construct
  source 1..10: mol_type = other DNA
gggccgggac

SEQ ID NO: 41395 - DNA, 10 bp, synthetic construct
  source 1..10: mol_type = other DNA
gggaccggga

SEQ ID NO: 41396 - DNA, 10 bp, synthetic construct
  source 1..10: mol_type = other DNA
ccaaacagag

SEQ ID NO: 41397 - DNA, 10 bp, synthetic construct
  source 1..10: mol_type = other DNA
tccccccacc

SEQ ID NO: 41398 - DNA, 10 bp, synthetic construct
  source 1..10: mol_type = other DNA
ccttggccga

SEQ ID NO: 41399 - DNA, 10 bp, synthetic construct
  source 1..10: mol_type = other DNA
ggtgatccac

SEQ ID NO: 41400 - DNA, 10 bp, synthetic construct
  source 1..10: mol_type = other DNA
ccttgtgaga

SEQ ID NO: 41401 - DNA, 10 bp, synthetic construct
  source 1..10: mol_type = other DNA
cttacatcac

SEQ ID NO: 41402 - DNA, 10 bp, synthetic construct
  source 1..10: mol_type = other DNA
tcactccaga

SEQ ID NO: 41403 - DNA, 10 bp, synthetic construct
  source 1..10: mol_type = other DNA
ggagcccgat

SEQ ID NO: 41404 - DNA, 10 bp, synthetic construct
  source 1..10: mol_type = other DNA
ccaaaaggat

SEQ ID NO: 41405 - DNA, 10 bp, synthetic construct
  source 1..10: mol_type = other DNA
tattttaaca

SEQ ID NO: 41406 - DNA, 10 bp, synthetic construct
  source 1..10: mol_type = other DNA
gatgccagtg

SEQ ID NO: 41407 - DNA, 10 bp, synthetic construct
  source 1..10: mol_type = other DNA
ctgggttgta

SEQ ID NO: 41408 - DNA, 10 bp, synthetic construct
  source 1..10: mol_type = other DNA
aggtagccac

SEQ ID NO: 41409 - DNA, 10 bp, synthetic construct
  source 1..10: mol_type = other DNA
gacgcccgcc

SEQ ID NO: 41410 - DNA, 10 bp, synthetic construct
  source 1..10: mol_type = other DNA
acccctggac

SEQ ID NO: 41411 - DNA, 10 bp, synthetic construct
  source 1..10: mol_type = other DNA
gggaagagca

SEQ ID NO: 41412 - DNA, 10 bp, synthetic construct
  source 1..10: mol_type = other DNA
gctgccataa

SEQ ID NO: 41413 - DNA, 10 bp, synthetic construct
  source 1..10: mol_type = other DNA
ttttgctgct

SEQ ID NO: 41414 - DNA, 10 bp, synthetic construct
  source 1..10: mol_type = other DNA
cgccgaggac

SEQ ID NO: 41415 - DNA, 10 bp, synthetic construct
  source 1..10: mol_type = other DNA
acgaggacga

SEQ ID NO: 41416 - DNA, 10 bp, synthetic construct
  source 1..10: mol_type = other DNA
tctgcagaac

SEQ ID NO: 41417 - DNA, 10 bp, synthetic construct
  source 1..10: mol_type = other DNA
gagcccccca

SEQ ID NO: 41418 - DNA, 10 bp, synthetic construct
  source 1..10: mol_type = other DNA
cggagccagc

SEQ ID NO: 41419 - DNA, 10 bp, synthetic construct
  source 1..10: mol_type = other DNA
gagcccggaa

SEQ ID NO: 41420 - DNA, 10 bp, synthetic construct
  source 1..10: mol_type = other DNA
cactccttct

SEQ ID NO: 41421 - DNA, 10 bp, synthetic construct
  source 1..10: mol_type = other DNA
cagccggttc

SEQ ID NO: 41422 - DNA, 10 bp, synthetic construct
  source 1..10: mol_type = other DNA
cactccctga

SEQ ID NO: 41423 - DNA, 10 bp, synthetic construct
  source 1..10: mol_type = other DNA
atctgccctt

SEQ ID NO: 41424 - DNA, 10 bp, synthetic construct
  source 1..10: mol_type = other DNA
tccctcttag

SEQ ID NO: 41425 - DNA, 10 bp, synthetic construct
  source 1..10: mol_type = other DNA
ctgccacagg

SEQ ID NO: 41426 - DNA, 10 bp, synthetic construct
  source 1..10: mol_type = other DNA
cagtggtcca

SEQ ID NO: 41427 - DNA, 10 bp, synthetic construct
  source 1..10: mol_type = other DNA
taatgtgtag

SEQ ID NO: 41428 - DNA, 10 bp, synthetic construct
  source 1..10: mol_type = other DNA
tacaaataca

SEQ ID NO: 41429 - DNA, 10 bp, synthetic construct
  source 1..10: mol_type = other DNA
agatgataca

SEQ ID NO: 41430 - DNA, 10 bp, synthetic construct
  source 1..10: mol_type = other DNA
atgctttgta

SEQ ID NO: 41431 - DNA, 10 bp, synthetic construct
  source 1..10: mol_type = other DNA
taatttgggg

SEQ ID NO: 41432 - DNA, 10 bp, synthetic construct
  source 1..10: mol_type = other DNA
gatcactaca

SEQ ID NO: 41433 - DNA, 10 bp, synthetic construct
  source 1..10: mol_type = other DNA
gctgatagtt

SEQ ID NO: 41434 - DNA, 10 bp, synthetic construct
  source 1..10: mol_type = other DNA
acactccctc

SEQ ID NO: 41435 - DNA, 10 bp, synthetic construct
  source 1..10: mol_type = other DNA
taggctgcca

SEQ ID NO: 41436 - DNA, 10 bp, synthetic construct
  source 1..10: mol_type = other DNA
ccctcttagg

SEQ ID NO: 41437 - DNA, 10 bp, synthetic construct
  source 1..10: mol_type = other DNA
tgccacagga

SEQ ID NO: 41438 - DNA, 10 bp, synthetic construct
  source 1..10: mol_type = other DNA
gagccccggg

SEQ ID NO: 41439 - DNA, 10 bp, synthetic construct
  source 1..10: mol_type = other DNA
tatcactgtg

SEQ ID NO: 41440 - DNA, 10 bp, synthetic construct
  source 1..10: mol_type = other DNA
caagcgctgc

SEQ ID NO: 41441 - DNA, 10 bp, synthetic construct
  source 1..10: mol_type = other DNA
tcatcgagca

SEQ ID NO: 41442 - DNA, 10 bp, synthetic construct
  source 1..10: mol_type = other DNA
actcagactt

SEQ ID NO: 41443 - DNA, 10 bp, synthetic construct
  source 1..10: mol_type = other DNA
caccttcacc

SEQ ID NO: 41444 - DNA, 10 bp, synthetic construct
  source 1..10: mol_type = other DNA
cctcgatctc

SEQ ID NO: 41445 - DNA, 10 bp, synthetic construct
  source 1..10: mol_type = other DNA
tgcacggtgg

SEQ ID NO: 41446 - DNA, 10 bp, synthetic construct
  source 1..10: mol_type = other DNA
ccttctatat

SEQ ID NO: 41447 - DNA, 10 bp, synthetic construct
  source 1..10: mol_type = other DNA
atggaccgaa

SEQ ID NO: 41448 - DNA, 10 bp, synthetic construct
  source 1..10: mol_type = other DNA
aggcctcaga

SEQ ID NO: 41449 - DNA, 10 bp, synthetic construct
  source 1..10: mol_type = other DNA
gtttctagaa

SEQ ID NO: 41450 - DNA, 10 bp, synthetic construct
  source 1..10: mol_type = other DNA
ctctccttgg

SEQ ID NO: 41451 - DNA, 10 bp, synthetic construct
  source 1..10: mol_type = other DNA
ttccctggtc

SEQ ID NO: 41452 - DNA, 10 bp, synthetic construct
  source 1..10: mol_type = other DNA
gtccccagaa

SEQ ID NO: 41453 - DNA, 10 bp, synthetic construct
  source 1..10: mol_type = other DNA
tggacatgat

SEQ ID NO: 41454 - DNA, 10 bp, synthetic construct
  source 1..10: mol_type = other DNA
cacgtggttt

SEQ ID NO: 41455 - DNA, 10 bp, synthetic construct
  source 1..10: mol_type = other DNA
ccaccaactg

SEQ ID NO: 41456 - DNA, 10 bp, synthetic construct
  source 1..10: mol_type = other DNA
tcttggtagg

SEQ ID NO: 41457 - DNA, 10 bp, synthetic construct
  source 1..10: mol_type = other DNA
ggtatatttt

SEQ ID NO: 41458 - DNA, 10 bp, synthetic construct
  source 1..10: mol_type = other DNA
aggtcccctg

SEQ ID NO: 41459 - DNA, 10 bp, synthetic construct
  source 1..10: mol_type = other DNA
tggccattcc

SEQ ID NO: 41460 - DNA, 10 bp, synthetic construct
  source 1..10: mol_type = other DNA
tgccacatta

SEQ ID NO: 41461 - DNA, 10 bp, synthetic construct
  source 1..10: mol_type = other DNA
ttttgccatc

SEQ ID NO: 41462 - DNA, 10 bp, synthetic construct
  source 1..10: mol_type = other DNA
tgccacaatg

SEQ ID NO: 41463 - DNA, 10 bp, synthetic construct
  source 1..10: mol_type = other DNA
gtgccccggt

SEQ ID NO: 41464 - DNA, 10 bp, synthetic construct
  source 1..10: mol_type = other DNA
taaacataag

SEQ ID NO: 41465 - DNA, 10 bp, synthetic construct
  source 1..10: mol_type = other DNA
ggattcacac

SEQ ID NO: 41466 - DNA, 10 bp, synthetic construct
  source 1..10: mol_type = other DNA
cttttgaagg

SEQ ID NO: 41467 - DNA, 10 bp, synthetic construct
  source 1..10: mol_type = other DNA
ctgaggcaga

SEQ ID NO: 41468 - DNA, 10 bp, synthetic construct
  source 1..10: mol_type = other DNA
tgaagctgag

SEQ ID NO: 41469 - DNA, 10 bp, synthetic construct
  source 1..10: mol_type = other DNA
aggggagtaa

SEQ ID NO: 41470 - DNA, 10 bp, synthetic construct
  source 1..10: mol_type = other DNA
ctctccaacc

SEQ ID NO: 41471 - DNA, 10 bp, synthetic construct
  source 1..10: mol_type = other DNA
aagtgctaag

SEQ ID NO: 41472 - DNA, 10 bp, synthetic construct
  source 1..10: mol_type = other DNA
atggtgaaca

SEQ ID NO: 41473 - DNA, 10 bp, synthetic construct
  source 1..10: mol_type = other DNA
ggggccatag

SEQ ID NO: 41474 - DNA, 10 bp, synthetic construct
  source 1..10: mol_type = other DNA
ctctgcctca

SEQ ID NO: 41475 - DNA, 10 bp, synthetic construct
  source 1..10: mol_type = other DNA
tgggttccga

SEQ ID NO: 41476 - DNA, 10 bp, synthetic construct
  source 1..10: mol_type = other DNA
aagggtgact

SEQ ID NO: 41477 - DNA, 10 bp, synthetic construct
  source 1..10: mol_type = other DNA
taatgacagc

SEQ ID NO: 41478 - DNA, 10 bp, synthetic construct
  source 1..10: mol_type = other DNA
cttgacgttg

SEQ ID NO: 41479 - DNA, 10 bp, synthetic construct
  source 1..10: mol_type = other DNA
tgactgcccc

SEQ ID NO: 41480 - DNA, 10 bp, synthetic construct
  source 1..10: mol_type = other DNA
cttggaggtt

SEQ ID NO: 41481 - DNA, 10 bp, synthetic construct
  source 1..10: mol_type = other DNA
ctgctggtga

SEQ ID NO: 41482 - DNA, 10 bp, synthetic construct
  source 1..10: mol_type = other DNA
ctgggctgtg

SEQ ID NO: 41483 - DNA, 10 bp, synthetic construct
  source 1..10: mol_type = other DNA
ccagcagcac

SEQ ID NO: 41484 - DNA, 10 bp, synthetic construct
  source 1..10: mol_type = other DNA
tcccagcccc

SEQ ID NO: 41485 - DNA, 10 bp, synthetic construct
  source 1..10: mol_type = other DNA
ccccctcggc

SEQ ID NO: 41486 - DNA, 10 bp, synthetic construct
  source 1..10: mol_type = other DNA
tacaagatgc

SEQ ID NO: 41487 - DNA, 10 bp, synthetic construct
  source 1..10: mol_type = other DNA
caaggaagtg

SEQ ID NO: 41488 - DNA, 10 bp, synthetic construct
  source 1..10: mol_type = other DNA
gtaactgtca

SEQ ID NO: 41489 - DNA, 10 bp, synthetic construct
  source 1..10: mol_type = other DNA
gatatccagg

SEQ ID NO: 41490 - DNA, 10 bp, synthetic construct
  source 1..10: mol_type = other DNA
atggctgtgg

SEQ ID NO: 41491 - DNA, 10 bp, synthetic construct
  source 1..10: mol_type = other DNA
aaaacacaac

SEQ ID NO: 41492 - DNA, 10 bp, synthetic construct
  source 1..10: mol_type = other DNA
tcactaaaca

SEQ ID NO: 41493 - DNA, 10 bp, synthetic construct
  source 1..10: mol_type = other DNA
aaaaagggat

SEQ ID NO: 41494 - DNA, 10 bp, synthetic construct
  source 1..10: mol_type = other DNA
ttcctctggc

SEQ ID NO: 41495 - DNA, 10 bp, synthetic construct
  source 1..10: mol_type = other DNA
ctgggcccgg

SEQ ID NO: 41496 - DNA, 10 bp, synthetic construct
  source 1..10: mol_type = other DNA
accagggtac

SEQ ID NO: 41497 - DNA, 10 bp, synthetic construct
  source 1..10: mol_type = other DNA
tagtggtgcc

SEQ ID NO: 41498 - DNA, 10 bp, synthetic construct
  source 1..10: mol_type = other DNA
cagtgaccca

SEQ ID NO: 41499 - DNA, 10 bp, synthetic construct
  source 1..10: mol_type = other DNA
gaagggtggg

SEQ ID NO: 41500 - DNA, 10 bp, synthetic construct
  source 1..10: mol_type = other DNA
cacctgaaac

SEQ ID NO: 41501 - DNA, 10 bp, synthetic construct
  source 1..10: mol_type = other DNA
gcacaagcgt

SEQ ID NO: 41502 - DNA, 10 bp, synthetic construct
  source 1..10: mol_type = other DNA
agaagcctca

SEQ ID NO: 41503 - DNA, 10 bp, synthetic construct
  source 1..10: mol_type = other DNA
atgattcagg

SEQ ID NO: 41504 - DNA, 10 bp, synthetic construct
  source 1..10: mol_type = other DNA
ggcggccgca

SEQ ID NO: 41505 - DNA, 10 bp, synthetic construct
  source 1..10: mol_type = other DNA
ctgccaggtg

SEQ ID NO: 41506 - DNA, 10 bp, synthetic construct
  source 1..10: mol_type = other DNA
aaatgtgcct

SEQ ID NO: 41507 - DNA, 10 bp, synthetic construct
  source 1..10: mol_type = other DNA
cggttatccc

SEQ ID NO: 41508 - DNA, 10 bp, synthetic construct
  source 1..10: mol_type = other DNA
ggagtctgtt

SEQ ID NO: 41509 - DNA, 10 bp, synthetic construct
  source 1..10: mol_type = other DNA
agagccagtg

SEQ ID NO: 41510 - DNA, 10 bp, synthetic construct
  source 1..10: mol_type = other DNA
cttgctgacg

SEQ ID NO: 41511 - DNA, 10 bp, synthetic construct
  source 1..10: mol_type = other DNA
tccgctgggc

SEQ ID NO: 41512 - DNA, 10 bp, synthetic construct
  source 1..10: mol_type = other DNA
gaacttagaa

SEQ ID NO: 41513 - DNA, 10 bp, synthetic construct
  source 1..10: mol_type = other DNA
aagcagataa

SEQ ID NO: 41514 - DNA, 10 bp, synthetic construct
  source 1..10: mol_type = other DNA
tgagaaacat

SEQ ID NO: 41515 - DNA, 10 bp, synthetic construct
  source 1..10: mol_type = other DNA
gctgtggcaa

SEQ ID NO: 41516 - DNA, 10 bp, synthetic construct
  source 1..10: mol_type = other DNA
acgcgtggag

SEQ ID NO: 41517 - DNA, 10 bp, synthetic construct
  source 1..10: mol_type = other DNA
gtggaggaga

SEQ ID NO: 41518 - DNA, 10 bp, synthetic construct
  source 1..10: mol_type = other DNA
tggcccgata

SEQ ID NO: 41519 - DNA, 10 bp, synthetic construct
  source 1..10: mol_type = other DNA
catggctgtg

SEQ ID NO: 41520 - DNA, 10 bp, synthetic construct
  source 1..10: mol_type = other DNA
caaaacacaa

SEQ ID NO: 41521 - DNA, 10 bp, synthetic construct
  source 1..10: mol_type = other DNA
ggtttataaa

SEQ ID NO: 41522 - DNA, 10 bp, synthetic construct
  source 1..10: mol_type = other DNA
ctcagatgga

SEQ ID NO: 41523 - DNA, 10 bp, synthetic construct
  source 1..10: mol_type = other DNA
ccggtagtta

SEQ ID NO: 41524 - DNA, 10 bp, synthetic construct
  source 1..10: mol_type = other DNA
tatggttctc

SEQ ID NO: 41525 - DNA, 10 bp, synthetic construct
  source 1..10: mol_type = other DNA
ggtgcactga

SEQ ID NO: 41526 - DNA, 10 bp, synthetic construct
  source 1..10: mol_type = other DNA
aaacatggct

SEQ ID NO: 41527 - DNA, 10 bp, synthetic construct
  source 1..10: mol_type = other DNA
tggtgctcaa

SEQ ID NO: 41528 - DNA, 10 bp, synthetic construct
  source 1..10: mol_type = other DNA
ggtgagtggg

SEQ ID NO: 41529 - DNA, 10 bp, synthetic construct
  source 1..10: mol_type = other DNA
aaaagaaaca

SEQ ID NO: 41530 - DNA, 10 bp, synthetic construct
  source 1..10: mol_type = other DNA
atatatgcta

SEQ ID NO: 41531 - DNA, 10 bp, synthetic construct
  source 1..10: mol_type = other DNA
aagggcgcca

SEQ ID NO: 41532 - DNA, 10 bp, synthetic construct
  source 1..10: mol_type = other DNA
tcccgaagga

SEQ ID NO: 41533 - DNA, 10 bp, synthetic construct
  source 1..10: mol_type = other DNA
gtcctgtacc

SEQ ID NO: 41534 - DNA, 10 bp, synthetic construct
  source 1..10: mol_type = other DNA
cgccgtgcag

SEQ ID NO: 41535 - DNA, 10 bp, synthetic construct
  source 1..10: mol_type = other DNA
acagtgcagc

SEQ ID NO: 41536 - DNA, 10 bp, synthetic construct
  source 1..10: mol_type = other DNA
gggcgccttc

SEQ ID NO: 41537 - DNA, 10 bp, synthetic construct
  source 1..10: mol_type = other DNA
gggatcatag

SEQ ID NO: 41538 - DNA, 10 bp, synthetic construct
  source 1..10: mol_type = other DNA
ggacttggat

SEQ ID NO: 41539 - DNA, 10 bp, synthetic construct
  source 1..10: mol_type = other DNA
agagaccttc

SEQ ID NO: 41540 - DNA, 10 bp, synthetic construct
  source 1..10: mol_type = other DNA
atttggattt

SEQ ID NO: 41541 - DNA, 10 bp, synthetic construct
  source 1..10: mol_type = other DNA
aggagagttg

SEQ ID NO: 41542 - DNA, 10 bp, synthetic construct
  source 1..10: mol_type = other DNA
tatattcggc

SEQ ID NO: 41543 - DNA, 10 bp, synthetic construct
  source 1..10: mol_type = other DNA
acgcccagcc

SEQ ID NO: 41544 - DNA, 10 bp, synthetic construct
  source 1..10: mol_type = other DNA
cgcctgcgag

SEQ ID NO: 41545 - DNA, 10 bp, synthetic construct
  source 1..10: mol_type = other DNA
acctcagcac

SEQ ID NO: 41546 - DNA, 10 bp, synthetic construct
  source 1..10: mol_type = other DNA
aacctggtta

SEQ ID NO: 41547 - DNA, 10 bp, synthetic construct
  source 1..10: mol_type = other DNA
tgcccaggcc

SEQ ID NO: 41548 - DNA, 10 bp, synthetic construct
  source 1..10: mol_type = other DNA
ccgtcctgca

SEQ ID NO: 41549 - DNA, 10 bp, synthetic construct
  source 1..10: mol_type = other DNA
gtggagctgc

SEQ ID NO: 41550 - DNA, 10 bp, synthetic construct
  source 1..10: mol_type = other DNA
gcagtgttgg

SEQ ID NO: 41551 - DNA, 10 bp, synthetic construct
  source 1..10: mol_type = other DNA
tcctcctcat

SEQ ID NO: 41552 - DNA, 10 bp, synthetic construct
  source 1..10: mol_type = other DNA
ctcactagag

SEQ ID NO: 41553 - DNA, 10 bp, synthetic construct
  source 1..10: mol_type = other DNA
gctggctggc

SEQ ID NO: 41554 - DNA, 10 bp, synthetic construct
  source 1..10: mol_type = other DNA
acatcgccct

SEQ ID NO: 41555 - DNA, 10 bp, synthetic construct
  source 1..10: mol_type = other DNA
agaagaagca

SEQ ID NO: 41556 - DNA, 10 bp, synthetic construct
  source 1..10: mol_type = other DNA
ataaccaaac

SEQ ID NO: 41557 - DNA, 10 bp, synthetic construct
  source 1..10: mol_type = other DNA
aataaagaat

SEQ ID NO: 41558 - DNA, 10 bp, synthetic construct
  source 1..10: mol_type = other DNA
aaataaatgg

SEQ ID NO: 41559 - DNA, 10 bp, synthetic construct
  source 1..10: mol_type = other DNA
atgggcagca

SEQ ID NO: 41560 - DNA, 10 bp, synthetic construct
  source 1..10: mol_type = other DNA
ggccgtcatg

SEQ ID NO: 41561 - DNA, 10 bp, synthetic construct
  source 1..10: mol_type = other DNA
atgagtcaca

SEQ ID NO: 41562 - DNA, 10 bp, synthetic construct
  source 1..10: mol_type = other DNA
gctggtcatg

SEQ ID NO: 41563 - DNA, 10 bp, synthetic construct
  source 1..10: mol_type = other DNA
cagccccctg

SEQ ID NO: 41564 - DNA, 10 bp, synthetic construct
  source 1..10: mol_type = other DNA
tgccttgact

SEQ ID NO: 41565 - DNA, 10 bp, synthetic construct
  source 1..10: mol_type = other DNA
cccgccgggc

SEQ ID NO: 41566 - DNA, 10 bp, synthetic construct
  source 1..10: mol_type = other DNA
ttccgggcca

SEQ ID NO: 41567 - DNA, 10 bp, synthetic construct
  source 1..10: mol_type = other DNA
agcctgcagc

SEQ ID NO: 41568 - DNA, 10 bp, synthetic construct
  source 1..10: mol_type = other DNA
ggctgccatg

SEQ ID NO: 41569 - DNA, 10 bp, synthetic construct
  source 1..10: mol_type = other DNA
tcctgtgagc

SEQ ID NO: 41570 - DNA, 10 bp, synthetic construct
  source 1..10: mol_type = other DNA
ccgcctcctc

SEQ ID NO: 41571 - DNA, 10 bp, synthetic construct
  source 1..10: mol_type = other DNA
ctagtttttt

SEQ ID NO: 41572 - DNA, 10 bp, synthetic construct
  source 1..10: mol_type = other DNA
aaagagacat

SEQ ID NO: 41573 - DNA, 10 bp, synthetic construct
  source 1..10: mol_type = other DNA
gcggccgccg

SEQ ID NO: 41574 - DNA, 10 bp, synthetic construct
  source 1..10: mol_type = other DNA
ggtggcggcc

SEQ ID NO: 41575 - DNA, 10 bp, synthetic construct
  source 1..10: mol_type = other DNA
tgggaaacaa

SEQ ID NO: 41576 - DNA, 10 bp, synthetic construct
  source 1..10: mol_type = other DNA
attgacctcg

SEQ ID NO: 41577 - DNA, 10 bp, synthetic construct
  source 1..10: mol_type = other DNA
atccgatgac

SEQ ID NO: 41578 - DNA, 10 bp, synthetic construct
  source 1..10: mol_type = other DNA
gtgggaagca

SEQ ID NO: 41579 - DNA, 10 bp, synthetic construct
  source 1..10: mol_type = other DNA
cctgcctgag

SEQ ID NO: 41580 - DNA, 10 bp, synthetic construct
  source 1..10: mol_type = other DNA
tcagggatga

SEQ ID NO: 41581 - DNA, 10 bp, synthetic construct
  source 1..10: mol_type = other DNA
cacgggtgac

SEQ ID NO: 41582 - DNA, 10 bp, synthetic construct
  source 1..10: mol_type = other DNA
ccgggccccc

SEQ ID NO: 41583 - DNA, 10 bp, synthetic construct
  source 1..10: mol_type = other DNA
tgaaggcccc

SEQ ID NO: 41584 - DNA, 10 bp, synthetic construct
  source 1..10: mol_type = other DNA
cccacactca

SEQ ID NO: 41585 - DNA, 10 bp, synthetic construct
  source 1..10: mol_type = other DNA
ctcaccgcca

SEQ ID NO: 41586 - DNA, 10 bp, synthetic construct
  source 1..10: mol_type = other DNA
ggttccctct

SEQ ID NO: 41587 - DNA, 10 bp, synthetic construct
  source 1..10: mol_type = other DNA
gtgcaattgt

SEQ ID NO: 41588 - DNA, 10 bp, synthetic construct
  source 1..10: mol_type = other DNA
tatattaatc

SEQ ID NO: 41589 - DNA, 10 bp, synthetic construct
  source 1..10: mol_type = other DNA
agaacgtgaa

SEQ ID NO: 41590 - DNA, 10 bp, synthetic construct
  source 1..10: mol_type = other DNA
gtgaccttga

SEQ ID NO: 41591 - DNA, 10 bp, synthetic construct
  source 1..10: mol_type = other DNA
gccactacca

SEQ ID NO: 41592 - DNA, 10 bp, synthetic construct
  source 1..10: mol_type = other DNA
aggctctgag

SEQ ID NO: 41593 - DNA, 10 bp, synthetic construct
  source 1..10: mol_type = other DNA
tgacgccggg

SEQ ID NO: 41594 - DNA, 10 bp, synthetic construct
  source 1..10: mol_type = other DNA
ccccccccgt

SEQ ID NO: 41595 - DNA, 10 bp, synthetic construct
  source 1..10: mol_type = other DNA
gacgggagcc

SEQ ID NO: 41596 - DNA, 10 bp, synthetic construct
  source 1..10: mol_type = other DNA
gttgccaggg

SEQ ID NO: 41597 - DNA, 10 bp, synthetic construct
  source 1..10: mol_type = other DNA
gtactcctct

SEQ ID NO: 41598 - DNA, 10 bp, synthetic construct
  source 1..10: mol_type = other DNA
gacctgctgt

SEQ ID NO: 41599 - DNA, 10 bp, synthetic construct
  source 1..10: mol_type = other DNA
atgcacagcc

SEQ ID NO: 41600 - DNA, 10 bp, synthetic construct
  source 1..10: mol_type = other DNA
ctatttttct

SEQ ID NO: 41601 - DNA, 10 bp, synthetic construct
  source 1..10: mol_type = other DNA
gttatatgct

SEQ ID NO: 41602 - DNA, 10 bp, synthetic construct
  source 1..10: mol_type = other DNA
ttggggggta

SEQ ID NO: 41603 - DNA, 10 bp, synthetic construct
  source 1..10: mol_type = other DNA
gtaggactgc

SEQ ID NO: 41604 - DNA, 10 bp, synthetic construct
  source 1..10: mol_type = other DNA
gctgctccga

SEQ ID NO: 41605 - DNA, 10 bp, synthetic construct
  source 1..10: mol_type = other DNA
tgggataagg

SEQ ID NO: 41606 - DNA, 10 bp, synthetic construct
  source 1..10: mol_type = other DNA
actggatatc

SEQ ID NO: 41607 - DNA, 10 bp, synthetic construct
  source 1..10: mol_type = other DNA
cccccgttgt

SEQ ID NO: 41608 - DNA, 10 bp, synthetic construct
  source 1..10: mol_type = other DNA
ggcgatgttc

SEQ ID NO: 41609 - DNA, 10 bp, synthetic construct
  source 1..10: mol_type = other DNA
catctgaata

SEQ ID NO: 41610 - DNA, 10 bp, synthetic construct
  source 1..10: mol_type = other DNA
acgctacggg

SEQ ID NO: 41611 - DNA, 10 bp, synthetic construct
  source 1..10: mol_type = other DNA
ctaggatcgg

SEQ ID NO: 41612 - DNA, 10 bp, synthetic construct
  source 1..10: mol_type = other DNA
tgttgggggt

SEQ ID NO: 41613 - DNA, 10 bp, synthetic construct
  source 1..10: mol_type = other DNA
ctactagtca

SEQ ID NO: 41614 - DNA, 10 bp, synthetic construct
  source 1..10: mol_type = other DNA
catggggggg

SEQ ID NO: 41615 - DNA, 10 bp, synthetic construct
  source 1..10: mol_type = other DNA
tataggtgca

SEQ ID NO: 41616 - DNA, 10 bp, synthetic construct
  source 1..10: mol_type = other DNA
accactgcac

SEQ ID NO: 41617 - DNA, 10 bp, synthetic construct
  source 1..10: mol_type = other DNA
gcgtacacac

SEQ ID NO: 41618 - DNA, 10 bp, synthetic construct
  source 1..10: mol_type = other DNA
aacgtacatc

SEQ ID NO: 41619 - DNA, 10 bp, synthetic construct
  source 1..10: mol_type = other DNA
tgcctgtcct

SEQ ID NO: 41620 - DNA, 10 bp, synthetic construct
  source 1..10: mol_type = other DNA
cctgctctcc

SEQ ID NO: 41621 - DNA, 10 bp, synthetic construct
  source 1..10: mol_type = other DNA
ggttcagaat

SEQ ID NO: 41622 - DNA, 10 bp, synthetic construct
  source 1..10: mol_type = other DNA
tttccttcta

SEQ ID NO: 41623 - DNA, 10 bp, synthetic construct
  source 1..10: mol_type = other DNA
gatcaagagg

SEQ ID NO: 41624 - DNA, 10 bp, synthetic construct
  source 1..10: mol_type = other DNA
tgcgctcctg

SEQ ID NO: 41625 - DNA, 10 bp, synthetic construct
  source 1..10: mol_type = other DNA
agagaaacct

SEQ ID NO: 41626 - DNA, 10 bp, synthetic construct
  source 1..10: mol_type = other DNA
acaaatgtga

SEQ ID NO: 41627 - DNA, 10 bp, synthetic construct
  source 1..10: mol_type = other DNA
catggcaaat

SEQ ID NO: 41628 - DNA, 10 bp, synthetic construct
  source 1..10: mol_type = other DNA
cactcctgac

SEQ ID NO: 41629 - DNA, 10 bp, synthetic construct
  source 1..10: mol_type = other DNA
tggaccaggc

SEQ ID NO: 41630 - DNA, 10 bp, synthetic construct
  source 1..10: mol_type = other DNA
gtaggcggag

SEQ ID NO: 41631 - DNA, 10 bp, synthetic construct
  source 1..10: mol_type = other DNA
tcgggttact

SEQ ID NO: 41632 - DNA, 10 bp, synthetic construct
  source 1..10: mol_type = other DNA
acattcctca

SEQ ID NO: 41633 - DNA, 10 bp, synthetic construct
  source 1..10: mol_type = other DNA
atgtccacct

SEQ ID NO: 41634 - DNA, 10 bp, synthetic construct
  source 1..10: mol_type = other DNA
ggggcccttg

SEQ ID NO: 41635 - DNA, 10 bp, synthetic construct
  source 1..10: mol_type = other DNA
ttctgtaggg

SEQ ID NO: 41636 - DNA, 10 bp, synthetic construct
  source 1..10: mol_type = other DNA
tggcatgagt

SEQ ID NO: 41637 - DNA, 10 bp, synthetic construct
  source 1..10: mol_type = other DNA
ctcataatgt

SEQ ID NO: 41638 - DNA, 10 bp, synthetic construct
  source 1..10: mol_type = other DNA
tttcaggggc

SEQ ID NO: 41639 - DNA, 10 bp, synthetic construct
  source 1..10: mol_type = other DNA
atctgttgca

SEQ ID NO: 41640 - DNA, 10 bp, synthetic construct
  source 1..10: mol_type = other DNA
gctgcggccc

SEQ ID NO: 41641 - DNA, 10 bp, synthetic construct
  source 1..10: mol_type = other DNA
caagatggac

SEQ ID NO: 41642 - DNA, 10 bp, synthetic construct
  source 1..10: mol_type = other DNA
ccgcggagga

SEQ ID NO: 41643 - DNA, 10 bp, synthetic construct
  source 1..10: mol_type = other DNA
atgttgattt

SEQ ID NO: 41644 - DNA, 10 bp, synthetic construct
  source 1..10: mol_type = other DNA
atttaccaaa

SEQ ID NO: 41645 - DNA, 10 bp, synthetic construct
  source 1..10: mol_type = other DNA
ccaaattcta

SEQ ID NO: 41646 - DNA, 10 bp, synthetic construct
  source 1..10: mol_type = other DNA
agagcaacca

SEQ ID NO: 41647 - DNA, 10 bp, synthetic construct
  source 1..10: mol_type = other DNA
ctcaccagtg

SEQ ID NO: 41648 - DNA, 10 bp, synthetic construct
  source 1..10: mol_type = other DNA
ctcgtatatc

SEQ ID NO: 41649 - DNA, 10 bp, synthetic construct
  source 1..10: mol_type = other DNA
ccagcttcac

SEQ ID NO: 41650 - DNA, 10 bp, synthetic construct
  source 1..10: mol_type = other DNA
gctgaagcgc

SEQ ID NO: 41651 - DNA, 10 bp, synthetic construct
  source 1..10: mol_type = other DNA
aggtttttca

SEQ ID NO: 41652 - DNA, 10 bp, synthetic construct
  source 1..10: mol_type = other DNA
gccgaagaat

SEQ ID NO: 41653 - DNA, 10 bp, synthetic construct
  source 1..10: mol_type = other DNA
tcatacatgg

SEQ ID NO: 41654 - DNA, 10 bp, synthetic construct
  source 1..10: mol_type = other DNA
aaacattaga

SEQ ID NO: 41655 - DNA, 10 bp, synthetic construct
  source 1..10: mol_type = other DNA
aggcctttga

SEQ ID NO: 41656 - DNA, 10 bp, synthetic construct
  source 1..10: mol_type = other DNA
gacgacacag

SEQ ID NO: 41657 - DNA, 10 bp, synthetic construct
  source 1..10: mol_type = other DNA
cccatggtat

SEQ ID NO: 41658 - DNA, 10 bp, synthetic construct
  source 1..10: mol_type = other DNA
gaaaagctca

SEQ ID NO: 41659 - DNA, 10 bp, synthetic construct
  source 1..10: mol_type = other DNA
acatacactc

SEQ ID NO: 41660 - DNA, 10 bp, synthetic construct
  source 1..10: mol_type = other DNA
cactatagtt

SEQ ID NO: 41661 - DNA, 10 bp, synthetic construct
  source 1..10: mol_type = other DNA
tagtcccggt

SEQ ID NO: 41662 - DNA, 10 bp, synthetic construct
  source 1..10: mol_type = other DNA
aattaaagat

SEQ ID NO: 41663 - DNA, 10 bp, synthetic construct
  source 1..10: mol_type = other DNA
accgcttcag

SEQ ID NO: 41664 - DNA, 10 bp, synthetic construct
  source 1..10: mol_type = other DNA
tcgccattat

SEQ ID NO: 41665 - DNA, 10 bp, synthetic construct
  source 1..10: mol_type = other DNA
agggccatgg

SEQ ID NO: 41666 - DNA, 10 bp, synthetic construct
  source 1..10: mol_type = other DNA
tgtcatctcc

SEQ ID NO: 41667 - DNA, 10 bp, synthetic construct
  source 1..10: mol_type = other DNA
ttcagcacaa

SEQ ID NO: 41668 - DNA, 10 bp, synthetic construct
  source 1..10: mol_type = other DNA
gctgatgtac

SEQ ID NO: 41669 - DNA, 10 bp, synthetic construct
  source 1..10: mol_type = other DNA
ccaagatgat

SEQ ID NO: 41670 - DNA, 10 bp, synthetic construct
  source 1..10: mol_type = other DNA
ccctgtgact

SEQ ID NO: 41671 - DNA, 10 bp, synthetic construct
  source 1..10: mol_type = other DNA
aggaggactg

SEQ ID NO: 41672 - DNA, 10 bp, synthetic construct
  source 1..10: mol_type = other DNA
ggactccagt

SEQ ID NO: 41673 - DNA, 10 bp, synthetic construct
  source 1..10: mol_type = other DNA
aggcctcacc

SEQ ID NO: 41674 - DNA, 10 bp, synthetic construct
  source 1..10: mol_type = other DNA
aagtaagttc

SEQ ID NO: 41675 - DNA, 10 bp, synthetic construct
  source 1..10: mol_type = other DNA
tgctcaccaa

SEQ ID NO: 41676 - DNA, 10 bp, synthetic construct
  source 1..10: mol_type = other DNA
ctcttgaggc

SEQ ID NO: 41677 - DNA, 10 bp, synthetic construct
  source 1..10: mol_type = other DNA
tcctcacaca

SEQ ID NO: 41678 - DNA, 10 bp, synthetic construct
  source 1..10: mol_type = other DNA
acactaacta

SEQ ID NO: 41679 - DNA, 10 bp, synthetic construct
  source 1..10: mol_type = other DNA
aagtttgaaa

SEQ ID NO: 41680 - DNA, 10 bp, synthetic construct
  source 1..10: mol_type = other DNA
aaaatttagt

SEQ ID NO: 41681 - DNA, 10 bp, synthetic construct
  source 1..10: mol_type = other DNA
ttttctagtt

SEQ ID NO: 41682 - DNA, 10 bp, synthetic construct
  source 1..10: mol_type = other DNA
agcagtccac

SEQ ID NO: 41683 - DNA, 10 bp, synthetic construct
  source 1..10: mol_type = other DNA
ctatcagcca

SEQ ID NO: 41684 - DNA, 10 bp, synthetic construct
  source 1..10: mol_type = other DNA
ccaagagata

SEQ ID NO: 41685 - DNA, 10 bp, synthetic construct
  source 1..10: mol_type = other DNA
ctgcctcccg

SEQ ID NO: 41686 - DNA, 10 bp, synthetic construct
  source 1..10: mol_type = other DNA
gacgctggac

SEQ ID NO: 41687 - DNA, 10 bp, synthetic construct
  source 1..10: mol_type = other DNA
cttcagggcc

SEQ ID NO: 41688 - DNA, 10 bp, synthetic construct
  source 1..10: mol_type = other DNA
gcagcagctg

SEQ ID NO: 41689 - DNA, 10 bp, synthetic construct
  source 1..10: mol_type = other DNA
aattttagga

SEQ ID NO: 41690 - DNA, 10 bp, synthetic construct
  source 1..10: mol_type = other DNA
gacagccgcc

SEQ ID NO: 41691 - DNA, 10 bp, synthetic construct
  source 1..10: mol_type = other DNA
tcttgaatta

SEQ ID NO: 41692 - DNA, 10 bp, synthetic construct
  source 1..10: mol_type = other DNA
attcaaaagg

SEQ ID NO: 41693 - DNA, 10 bp, synthetic construct
  source 1..10: mol_type = other DNA
gctgccaaca

SEQ ID NO: 41694 - DNA, 10 bp, synthetic construct
  source 1..10: mol_type = other DNA
atttacattt

SEQ ID NO: 41695 - DNA, 10 bp, synthetic construct
  source 1..10: mol_type = other DNA
cggcaatgcg

SEQ ID NO: 41696 - DNA, 10 bp, synthetic construct
  source 1..10: mol_type = other DNA
cgggggtggc

SEQ ID NO: 41697 - DNA, 10 bp, synthetic construct
  source 1..10: mol_type = other DNA
gccctatggc

SEQ ID NO: 41698 - DNA, 10 bp, synthetic construct
  source 1..10: mol_type = other DNA
tggctctcac

SEQ ID NO: 41699 - DNA, 10 bp, synthetic construct
  source 1..10: mol_type = other DNA
tgggcagttc

SEQ ID NO: 41700 - DNA, 10 bp, synthetic construct
  source 1..10: mol_type = other DNA
ctgaacatca

SEQ ID NO: 41701 - DNA, 10 bp, synthetic construct
  source 1..10: mol_type = other DNA
aagactccca

SEQ ID NO: 41702 - DNA, 10 bp, synthetic construct
  source 1..10: mol_type = other DNA
ccccaggatc

SEQ ID NO: 41703 - DNA, 10 bp, synthetic construct
  source 1..10: mol_type = other DNA
gccacgggca

SEQ ID NO: 41704 - DNA, 10 bp, synthetic construct
  source 1..10: mol_type = other DNA
catgccgggg

SEQ ID NO: 41705 - DNA, 10 bp, synthetic construct
  source 1..10: mol_type = other DNA
atgatggccc

SEQ ID NO: 41706 - DNA, 10 bp, synthetic construct
  source 1..10: mol_type = other DNA
aatgctaaac

SEQ ID NO: 41707 - DNA, 10 bp, synthetic construct
  source 1..10: mol_type = other DNA
cggtggaaca

SEQ ID NO: 41708 - DNA, 10 bp, synthetic construct
  source 1..10: mol_type = other DNA
gactccatcc

SEQ ID NO: 41709 - DNA, 10 bp, synthetic construct
  source 1..10: mol_type = other DNA
cagctccccc

SEQ ID NO: 41710 - DNA, 10 bp, synthetic construct
  source 1..10: mol_type = other DNA
gtggggtctc

SEQ ID NO: 41711 - DNA, 10 bp, synthetic construct
  source 1..10: mol_type = other DNA
agatgggcaa

SEQ ID NO: 41712 - DNA, 10 bp, synthetic construct
  source 1..10: mol_type = other DNA
atttaaagcc

SEQ ID NO: 41713 - DNA, 10 bp, synthetic construct
  source 1..10: mol_type = other DNA
gatcagttct

SEQ ID NO: 41714 - DNA, 10 bp, synthetic construct
  source 1..10: mol_type = other DNA
tgtgttcagc

SEQ ID NO: 41715 - DNA, 10 bp, synthetic construct
  source 1..10: mol_type = other DNA
gggggctcag

SEQ ID NO: 41716 - DNA, 10 bp, synthetic construct
  source 1..10: mol_type = other DNA
ctcaatggcg

SEQ ID NO: 41717 - DNA, 10 bp, synthetic construct
  source 1..10: mol_type = other DNA
ttggccaaaa

SEQ ID NO: 41718 - DNA, 10 bp, synthetic construct
  source 1..10: mol_type = other DNA
gcacatgggg

SEQ ID NO: 41719 - DNA, 10 bp, synthetic construct
  source 1..10: mol_type = other DNA
gcagctctgt

SEQ ID NO: 41720 - DNA, 10 bp, synthetic construct
  source 1..10: mol_type = other DNA
atgtagttgc

SEQ ID NO: 41721 - DNA, 10 bp, synthetic construct
  source 1..10: mol_type = other DNA
gatagactca

SEQ ID NO: 41722 - DNA, 10 bp, synthetic construct
  source 1..10: mol_type = other DNA
aactgcttga

SEQ ID NO: 41723 - DNA, 10 bp, synthetic construct
  source 1..10: mol_type = other DNA
ccggtgtccc

SEQ ID NO: 41724 - DNA, 10 bp, synthetic construct
  source 1..10: mol_type = other DNA
tcctggagag

SEQ ID NO: 41725 - DNA, 10 bp, synthetic construct
  source 1..10: mol_type = other DNA
gacctggagg

SEQ ID NO: 41726 - DNA, 10 bp, synthetic construct
  source 1..10: mol_type = other DNA
aaaggggggc

SEQ ID NO: 41727 - DNA, 10 bp, synthetic construct
  source 1..10: mol_type = other DNA
cccgggggct

SEQ ID NO: 41728 - DNA, 10 bp, synthetic construct
  source 1..10: mol_type = other DNA
cgctgtaaag

SEQ ID NO: 41729 - DNA, 10 bp, synthetic construct
  source 1..10: mol_type = other DNA
gaagataaac

SEQ ID NO: 41730 - DNA, 10 bp, synthetic construct
  source 1..10: mol_type = other DNA
aaaactagct

SEQ ID NO: 41731 - DNA, 10 bp, synthetic construct
  source 1..10: mol_type = other DNA
gccgccgggc

SEQ ID NO: 41732 - DNA, 10 bp, synthetic construct
  source 1..10: mol_type = other DNA
ccctcgtgcc

SEQ ID NO: 41733 - DNA, 10 bp, synthetic construct
  source 1..10: mol_type = other DNA
gcaccgcaaa

SEQ ID NO: 41734 - DNA, 10 bp, synthetic construct
  source 1..10: mol_type = other DNA
cggggaccca

SEQ ID NO: 41735 - DNA, 10 bp, synthetic construct
  source 1..10: mol_type = other DNA
tcctttgtta

SEQ ID NO: 41736 - DNA, 10 bp, synthetic construct
  source 1..10: mol_type = other DNA
caaacaacct

SEQ ID NO: 41737 - DNA, 10 bp, synthetic construct
  source 1..10: mol_type = other DNA
ggctgggggc

SEQ ID NO: 41738 - DNA, 10 bp, synthetic construct
  source 1..10: mol_type = other DNA
ggaggggggc

SEQ ID NO: 41739 - DNA, 10 bp, synthetic construct
  source 1..10: mol_type = other DNA
tcaggctctt

SEQ ID NO: 41740 - DNA, 10 bp, synthetic construct
  source 1..10: mol_type = other DNA
atcctcgtcg

SEQ ID NO: 41741 - DNA, 10 bp, synthetic construct
  source 1..10: mol_type = other DNA
ctgcctgcag

SEQ ID NO: 41742 - DNA, 10 bp, synthetic construct
  source 1..10: mol_type = other DNA
cgggtcacgg

SEQ ID NO: 41743 - DNA, 10 bp, synthetic construct
  source 1..10: mol_type = other DNA
tgcccaccat

SEQ ID NO: 41744 - DNA, 10 bp, synthetic construct
  source 1..10: mol_type = other DNA
actgcaaggc

SEQ ID NO: 41745 - DNA, 10 bp, synthetic construct
  source 1..10: mol_type = other DNA
gggctccagg

SEQ ID NO: 41746 - DNA, 10 bp, synthetic construct
  source 1..10: mol_type = other DNA
ccgggcgtag

SEQ ID NO: 41747 - DNA, 10 bp, synthetic construct
  source 1..10: mol_type = other DNA
gattaaaagc

SEQ ID NO: 41748 - DNA, 10 bp, synthetic construct
  source 1..10: mol_type = other DNA
gttacggaaa

SEQ ID NO: 41749 - DNA, 10 bp, synthetic construct
  source 1..10: mol_type = other DNA
accccggaga

SEQ ID NO: 41750 - DNA, 10 bp, synthetic construct
  source 1..10: mol_type = other DNA
ccccagagag

SEQ ID NO: 41751 - DNA, 10 bp, synthetic construct
  source 1..10: mol_type = other DNA
acaatctgtt

SEQ ID NO: 41752 - DNA, 10 bp, synthetic construct
  source 1..10: mol_type = other DNA
accagatatc

SEQ ID NO: 41753 - DNA, 10 bp, synthetic construct
  source 1..10: mol_type = other DNA
agagagcatc

SEQ ID NO: 41754 - DNA, 10 bp, synthetic construct
  source 1..10: mol_type = other DNA
tgaacactcc

SEQ ID NO: 41755 - DNA, 10 bp, synthetic construct
  source 1..10: mol_type = other DNA
tgttttagat

SEQ ID NO: 41756 - DNA, 10 bp, synthetic construct
  source 1..10: mol_type = other DNA
cccctcctcc

SEQ ID NO: 41757 - DNA, 10 bp, synthetic construct
  source 1..10: mol_type = other DNA
tcattaggca

SEQ ID NO: 41758 - DNA, 10 bp, synthetic construct
  source 1..10: mol_type = other DNA
gactatggac

SEQ ID NO: 41759 - DNA, 10 bp, synthetic construct
  source 1..10: mol_type = other DNA
ttcaatcctt

SEQ ID NO: 41760 - DNA, 10 bp, synthetic construct
  source 1..10: mol_type = other DNA
agatcatcct

SEQ ID NO: 41761 - DNA, 10 bp, synthetic construct
  source 1..10: mol_type = other DNA
atttctgtgt

SEQ ID NO: 41762 - DNA, 10 bp, synthetic construct
  source 1..10: mol_type = other DNA
aagttaaatt

SEQ ID NO: 41763 - DNA, 10 bp, synthetic construct
  source 1..10: mol_type = other DNA
aacatctctt

SEQ ID NO: 41764 - DNA, 10 bp, synthetic construct
  source 1..10: mol_type = other DNA
ccgattacga

SEQ ID NO: 41765 - DNA, 10 bp, synthetic construct
  source 1..10: mol_type = other DNA
gtgagagcaa

SEQ ID NO: 41766 - DNA, 10 bp, synthetic construct
  source 1..10: mol_type = other DNA
agcctctggg

SEQ ID NO: 41767 - DNA, 10 bp, synthetic construct
  source 1..10: mol_type = other DNA
gatggtcctg

SEQ ID NO: 41768 - DNA, 10 bp, synthetic construct
  source 1..10: mol_type = other DNA
ggctggagcg

SEQ ID NO: 41769 - DNA, 10 bp, synthetic construct
  source 1..10: mol_type = other DNA
ttcatggaca

SEQ ID NO: 41770 - DNA, 10 bp, synthetic construct
  source 1..10: mol_type = other DNA
cacctccccg

SEQ ID NO: 41771 - DNA, 10 bp, synthetic construct
  source 1..10: mol_type = other DNA
ttgagacctt

SEQ ID NO: 41772 - DNA, 10 bp, synthetic construct
  source 1..10: mol_type = other DNA
ctaaaggctt

SEQ ID NO: 41773 - DNA, 10 bp, synthetic construct
  source 1..10: mol_type = other DNA
gatcctccgc

SEQ ID NO: 41774 - DNA, 10 bp, synthetic construct
  source 1..10: mol_type = other DNA
gcaggctgtg

SEQ ID NO: 41775 - DNA, 10 bp, synthetic construct
  source 1..10: mol_type = other DNA
aagatgtgcc

SEQ ID NO: 41776 - DNA, 10 bp, synthetic construct
  source 1..10: mol_type = other DNA
actagagtgg

SEQ ID NO: 41777 - DNA, 10 bp, synthetic construct
  source 1..10: mol_type = other DNA
acaaactgga

SEQ ID NO: 41778 - DNA, 10 bp, synthetic construct
  source 1..10: mol_type = other DNA
catgcagcgc

SEQ ID NO: 41779 - DNA, 10 bp, synthetic construct
  source 1..10: mol_type = other DNA
cttcagcaat

SEQ ID NO: 41780 - DNA, 10 bp, synthetic construct
  source 1..10: mol_type = other DNA
gctggaacag

SEQ ID NO: 41781 - DNA, 10 bp, synthetic construct
  source 1..10: mol_type = other DNA
agagatcttt

SEQ ID NO: 41782 - DNA, 10 bp, synthetic construct
  source 1..10: mol_type = other DNA
ttcccttgac

SEQ ID NO: 41783 - DNA, 10 bp, synthetic construct
  source 1..10: mol_type = other DNA
cttaaacgtt

SEQ ID NO: 41784 - DNA, 10 bp, synthetic construct
  source 1..10: mol_type = other DNA
tgatgctctt

SEQ ID NO: 41785 - DNA, 10 bp, synthetic construct
  source 1..10: mol_type = other DNA
tttgtcagca

SEQ ID NO: 41786 - DNA, 10 bp, synthetic construct
  source 1..10: mol_type = other DNA
ctttggacag

SEQ ID NO: 41787 - DNA, 10 bp, synthetic construct
  source 1..10: mol_type = other DNA
ttttttctga

SEQ ID NO: 41788 - DNA, 10 bp, synthetic construct
  source 1..10: mol_type = other DNA
agtccatcct

SEQ ID NO: 41789 - DNA, 10 bp, synthetic construct
  source 1..10: mol_type = other DNA
gaagcagagg

SEQ ID NO: 41790 - DNA, 10 bp, synthetic construct
  source 1..10: mol_type = other DNA
aggcgttgtc

SEQ ID NO: 41791 - DNA, 10 bp, synthetic construct
  source 1..10: mol_type = other DNA
gtctctgtca

SEQ ID NO: 41792 - DNA, 10 bp, synthetic construct
  source 1..10: mol_type = other DNA
gaagatttct

SEQ ID NO: 41793 - DNA, 10 bp, synthetic construct
  source 1..10: mol_type = other DNA
ttgttttcag

SEQ ID NO: 41794 - DNA, 10 bp, synthetic construct
  source 1..10: mol_type = other DNA
gtcgaacggc

SEQ ID NO: 41795 - DNA, 10 bp, synthetic construct
  source 1..10: mol_type = other DNA
gagcactttt

SEQ ID NO: 41796 - DNA, 10 bp, synthetic construct
  source 1..10: mol_type = other DNA
tgttattaag

SEQ ID NO: 41797 - DNA, 10 bp, synthetic construct
  source 1..10: mol_type = other DNA
gatgtattca

SEQ ID NO: 41798 - DNA, 10 bp, synthetic construct
  source 1..10: mol_type = other DNA
cagtatctgg

SEQ ID NO: 41799 - DNA, 10 bp, synthetic construct
  source 1..10: mol_type = other DNA
caagtggacc

SEQ ID NO: 41800 - DNA, 10 bp, synthetic construct
  source 1..10: mol_type = other DNA
gccacaatgt

SEQ ID NO: 41801 - DNA, 10 bp, synthetic construct
  source 1..10: mol_type = other DNA
agagtttcgc

SEQ ID NO: 41802 - DNA, 10 bp, synthetic construct
  source 1..10: mol_type = other DNA
tacagcctca

SEQ ID NO: 41803 - DNA, 10 bp, synthetic construct
  source 1..10: mol_type = other DNA
caagggagag

SEQ ID NO: 41804 - DNA, 10 bp, synthetic construct
  source 1..10: mol_type = other DNA
cgggcggcct

SEQ ID NO: 41805 - DNA, 10 bp, synthetic construct
  source 1..10: mol_type = other DNA
caatggccac

SEQ ID NO: 41806 - DNA, 10 bp, synthetic construct
  source 1..10: mol_type = other DNA
aaaatcatca

SEQ ID NO: 41807 - DNA, 10 bp, synthetic construct
  source 1..10: mol_type = other DNA
ttcggacagg

SEQ ID NO: 41808 - DNA, 10 bp, synthetic construct
  source 1..10: mol_type = other DNA
cggaggctcc

SEQ ID NO: 41809 - DNA, 10 bp, synthetic construct
  source 1..10: mol_type = other DNA
ggatggcact

SEQ ID NO: 41810 - DNA, 10 bp, synthetic construct
  source 1..10: mol_type = other DNA
gggagtcagc

SEQ ID NO: 41811 - DNA, 10 bp, synthetic construct
  source 1..10: mol_type = other DNA
tcctctccct

SEQ ID NO: 41812 - DNA, 10 bp, synthetic construct
  source 1..10: mol_type = other DNA
ctcctccatc

SEQ ID NO: 41813 - DNA, 10 bp, synthetic construct
  source 1..10: mol_type = other DNA
tgcagcaagg

SEQ ID NO: 41814 - DNA, 10 bp, synthetic construct
  source 1..10: mol_type = other DNA
cgccatcttg

SEQ ID NO: 41815 - DNA, 10 bp, synthetic construct
  source 1..10: mol_type = other DNA
accgcctgtg

SEQ ID NO: 41816 - DNA, 10 bp, synthetic construct
  source 1..10: mol_type = other DNA
aggttaaagg

SEQ ID NO: 41817 - DNA, 10 bp, synthetic construct
  source 1..10: mol_type = other DNA
gtaccagagg

SEQ ID NO: 41818 - DNA, 10 bp, synthetic construct
  source 1..10: mol_type = other DNA
tccagcccag

SEQ ID NO: 41819 - DNA, 10 bp, synthetic construct
  source 1..10: mol_type = other DNA
gctccagaat

SEQ ID NO: 41820 - DNA, 10 bp, synthetic construct
  source 1..10: mol_type = other DNA
ctcgatacaa

SEQ ID NO: 41821 - DNA, 10 bp, synthetic construct
  source 1..10: mol_type = other DNA
tccaagggcc

SEQ ID NO: 41822 - DNA, 10 bp, synthetic construct
  source 1..10: mol_type = other DNA
cggaggcctt

SEQ ID NO: 41823 - DNA, 10 bp, synthetic construct
  source 1..10: mol_type = other DNA
cctgacctca

SEQ ID NO: 41824 - DNA, 10 bp, synthetic construct
  source 1..10: mol_type = other DNA
acctggggaa

SEQ ID NO: 41825 - DNA, 10 bp, synthetic construct
  source 1..10: mol_type = other DNA
gccatagcct

SEQ ID NO: 41826 - DNA, 10 bp, synthetic construct
  source 1..10: mol_type = other DNA
ggaggttacc

SEQ ID NO: 41827 - DNA, 10 bp, synthetic construct
  source 1..10: mol_type = other DNA
tggcaaattc

SEQ ID NO: 41828 - DNA, 10 bp, synthetic construct
  source 1..10: mol_type = other DNA
aaaaggggta

SEQ ID NO: 41829 - DNA, 10 bp, synthetic construct
  source 1..10: mol_type = other DNA
gtaaaattct

SEQ ID NO: 41830 - DNA, 10 bp, synthetic construct
  source 1..10: mol_type = other DNA
tgtacctgat

SEQ ID NO: 41831 - DNA, 10 bp, synthetic construct
  source 1..10: mol_type = other DNA
caagggccgc

SEQ ID NO: 41832 - DNA, 10 bp, synthetic construct
  source 1..10: mol_type = other DNA
gaggccttct

SEQ ID NO: 41833 - DNA, 10 bp, synthetic construct
  source 1..10: mol_type = other DNA
ggcgtccaag

SEQ ID NO: 41834 - DNA, 10 bp, synthetic construct
  source 1..10: mol_type = other DNA
gccgcggagg

SEQ ID NO: 41835 - DNA, 10 bp, synthetic construct
  source 1..10: mol_type = other DNA
agccccagca

SEQ ID NO: 41836 - DNA, 10 bp, synthetic construct
  source 1..10: mol_type = other DNA
cagcagctcc

SEQ ID NO: 41837 - DNA, 10 bp, synthetic construct
  source 1..10: mol_type = other DNA
gcagcagcag

SEQ ID NO: 41838 - DNA, 10 bp, synthetic construct
  source 1..10: mol_type = other DNA
cccagcagca

SEQ ID NO: 41839 - DNA, 10 bp, synthetic construct
  source 1..10: mol_type = other DNA
tagcagcagc

SEQ ID NO: 41840 - DNA, 10 bp, synthetic construct
  source 1..10: mol_type = other DNA
ccagcagcag

SEQ ID NO: 41841 - DNA, 10 bp, synthetic construct
  source 1..10: mol_type = other DNA
agaggggtgg

SEQ ID NO: 41842 - DNA, 10 bp, synthetic construct
  source 1..10: mol_type = other DNA
gtgacgtgtg

SEQ ID NO: 41843 - DNA, 10 bp, synthetic construct
  source 1..10: mol_type = other DNA
gcagatgctg

SEQ ID NO: 41844 - DNA, 10 bp, synthetic construct
  source 1..10: mol_type = other DNA
actttctgtt

SEQ ID NO: 41845 - DNA, 10 bp, synthetic construct
  source 1..10: mol_type = other DNA
aggggtcttg

SEQ ID NO: 41846 - DNA, 10 bp, synthetic construct
  source 1..10: mol_type = other DNA
cagaggatct

SEQ ID NO: 41847 - DNA, 10 bp, synthetic construct
  source 1..10: mol_type = other DNA
tgttgaaaat

SEQ ID NO: 41848 - DNA, 10 bp, synthetic construct
  source 1..10: mol_type = other DNA
atttccccaa

SEQ ID NO: 41849 - DNA, 10 bp, synthetic construct
  source 1..10: mol_type = other DNA
gagatcgtgg

SEQ ID NO: 41850 - DNA, 10 bp, synthetic construct
  source 1..10: mol_type = other DNA
ccgaagccag

SEQ ID NO: 41851 - DNA, 10 bp, synthetic construct
  source 1..10: mol_type = other DNA
gaaccccgag

SEQ ID NO: 41852 - DNA, 10 bp, synthetic construct
  source 1..10: mol_type = other DNA
cccatcggac

SEQ ID NO: 41853 - DNA, 10 bp, synthetic construct
  source 1..10: mol_type = other DNA
tgtctgtctg

SEQ ID NO: 41854 - DNA, 10 bp, synthetic construct
  source 1..10: mol_type = other DNA
ctgaccatag

SEQ ID NO: 41855 - protein, 12 aa, synthetic construct
CALAGSDDKIIF

SEQ ID NO: 41856 - protein, 13 aa, synthetic construct
CAVTTSGTYKYIF

SEQ ID NO: 41857 - protein, 14 aa, synthetic construct
CAMSGAGNTGKLIF

SEQ ID NO: 41858 - protein, 14 aa, synthetic construct
CAVRPLTGANNLFF

SEQ ID NO: 41859 - protein, 12 aa, synthetic construct
CAGEEAGTALIF

SEQ ID NO: 41860 - protein, 11 aa, synthetic construct
CAATNTDKLIF

SEQ ID NO: 41861 - protein, 11 aa, synthetic construct
CAFMRSIDMRF

SEQ ID NO: 41862 - protein, 10 aa, synthetic construct
CAVSSYKLIF

SEQ ID NO: 41863 - protein, 15 aa, synthetic construct
CAVPRKNSNTGKLIF

SEQ ID NO: 41864 - protein, 13 aa, synthetic construct
CATGTRDGQKLLF

SEQ ID NO: 41865 - protein, 12 aa, synthetic construct
CILLDSSYKLIF

SEQ ID NO: 41866 - protein, 16 aa, synthetic construct
CAFLQSYGGSQGNLIF

SEQ ID NO: 41867 - protein, 10 aa, synthetic construct
CAVRARELLF

SEQ ID NO: 41868 - protein, 15 aa, synthetic construct
CAVSGSGDSWGKLQF

SEQ ID NO: 41869 - protein, 15 aa, synthetic construct
CAMSSDTGANSKLTF

SEQ ID NO: 41870 - protein, 15 aa, synthetic construct
CLVGDPKAAGNKLTF

SEQ ID NO: 41871 - protein, 14 aa, synthetic construct
CALSEAGSARQLTF

SEQ ID NO: 41872 - protein, 14 aa, synthetic construct
CALGELSNTDKLIF

SEQ ID NO: 41873 - protein, 13 aa, synthetic construct
CAVWNQAGTALIF

SEQ ID NO: 41874 - protein, 15 aa, synthetic construct
CASLLFSGGYNKLIF

SEQ ID NO: 41875 - protein, 18 aa, synthetic construct
CVVNVLNAGGTSYGKLTF

SEQ ID NO: 41876 - protein, 13 aa, synthetic construct
CAASPYNFNKFYF

SEQ ID NO: 41877 - protein, 14 aa, synthetic construct
CVVPGSGGSYIPTF

SEQ ID NO: 41878 - protein, 16 aa, synthetic construct
CAVRGASIKDTDKLIF

SEQ ID NO: 41879 - protein, 13 aa, synthetic construct
CAETVNNNARLMF

SEQ ID NO: 41880 - protein, 13 aa, synthetic construct
CAIPNQAGTALIF

SEQ ID NO: 41881 - protein, 14 aa, synthetic construct
CVVKYSGGYQKVTF

SEQ ID NO: 41882 - protein, 14 aa, synthetic construct
CAVSERLEGFKTIF

SEQ ID NO: 41883 - protein, 14 aa, synthetic construct
CAVSERLDGFKTIF

SEQ ID NO: 41884 - protein, 12 aa, synthetic construct
CAVGEAGTALIF

SEQ ID NO: 41885 - protein, 12 aa, synthetic construct
CISGAGSYQLTF

SEQ ID NO: 41886 - protein, 18 aa, synthetic construct
CAVSDPAISNFGNEKLTF

SEQ ID NO: 41887 - protein, 14 aa, synthetic construct
CAVGAGQAGTALIF

SEQ ID NO: 41888 - protein, 11 aa, synthetic construct
CLVGAGTALIF

SEQ ID NO: 41889 - protein, 14 aa, synthetic construct
CAVRETDSWGKFQF

SEQ ID NO: 41890 - protein, 16 aa, synthetic construct
CAMSGTMDTGRRALTF

SEQ ID NO: 41891 - protein, 12 aa, synthetic construct
CAVRDGGGKLIF

SEQ ID NO: 41892 - protein, 13 aa, synthetic construct
CAASPNQGGKLIF

SEQ ID NO: 41893 - protein, 15 aa, synthetic construct
CALGEPTSGTYKYIF

SEQ ID NO: 41894 - protein, 13 aa, synthetic construct
CVVKDNAGNMLTF

SEQ ID NO: 41895 - protein, 15 aa, synthetic construct
CLVGDPKAAGNKLTF

SEQ ID NO: 41896 - protein, 14 aa, synthetic construct
CALSEAGSARQLTF

SEQ ID NO: 41897 - protein, 14 aa, synthetic construct
CAVGAGQAGTALIF

SEQ ID NO: 41898 - protein, 17 aa, synthetic construct
CIVREALGSSPGYALNF

SEQ ID NO: 41899 - protein, 11 aa, synthetic construct
CAARYTYKYIF

SEQ ID NO: 41900 - protein, 15 aa, synthetic construct
CAVEDPYNQGGKLIF

SEQ ID NO: 41901 - protein, 15 aa, synthetic construct
CAVRALGAGSYQLTF

SEQ ID NO: 41902 - protein, 12 aa, synthetic construct
CAAIRPIDKLIF

SEQ ID NO: 41903 - protein, 13 aa, synthetic construct
CATSGSSYNEQFF

SEQ ID NO: 41904 - protein, 13 aa, synthetic construct
CASSEREVQPQHF

SEQ ID NO: 41905 - protein, 15 aa, synthetic construct
CASREGVLNTGELFF

SEQ ID NO: 41906 - protein, 15 aa, synthetic construct
CASRRTSGSYNEQFF

SEQ ID NO: 41907 - protein, 14 aa, synthetic construct
CASSLEGGGYEQFF

SEQ ID NO: 41908 - protein, 14 aa, synthetic construct
CASSFSLAGNEQFF

SEQ ID NO: 41909 - protein, 14 aa, synthetic construct
CASSYGQGGTEAFF

SEQ ID NO: 41910 - protein, 14 aa, synthetic construct
CASSSPGDPNIQYF

SEQ ID NO: 41911 - protein, 14 aa, synthetic construct
CASKEPSGANVLTF

SEQ ID NO: 41912 - protein, 17 aa, synthetic construct
CASRAKSPLHGANVLTF

SEQ ID NO: 41913 - protein, 15 aa, synthetic construct
CASSRGPSTNEKLFF

SEQ ID NO: 41914 - protein, 16 aa, synthetic construct
CASSPELAGGYNEQFF

SEQ ID NO: 41915 - protein, 15 aa, synthetic construct
CAISESAASYNEQFF

SEQ ID NO: 41916 - protein, 15 aa, synthetic construct
CASTRTYSSTDTQYF

SEQ ID NO: 41917 - protein, 15 aa, synthetic construct
CASSVEGRGGDTQYF

SEQ ID NO: 41918 - protein, 16 aa, synthetic construct
CASRLKREGSYNEQFF

SEQ ID NO: 41919 - protein, 15 aa, synthetic construct
CASSPAETSNQPQHF

SEQ ID NO: 41920 - protein, 18 aa, synthetic construct
CASSPFPPDRGPYNEQFF

SEQ ID NO: 41921 - protein, 15 aa, synthetic construct
CASSLRSSGDGTQYF

SEQ ID NO: 41922 - protein, 12 aa, synthetic construct
CAIRGTGNEQFF

SEQ ID NO: 41923 - protein, 14 aa, synthetic construct
CASSFYGSNYEQYF

SEQ ID NO: 41924 - protein, 14 aa, synthetic construct
CASSLSPTNYGYTF

SEQ ID NO: 41925 - protein, 15 aa, synthetic construct
CASTASGGVGNEQYF

SEQ ID NO: 41926 - protein, 14 aa, synthetic construct
CASTLGGGSYEQYF

SEQ ID NO: 41927 - protein, 15 aa, synthetic construct
CASSPIAGVENEQFF

SEQ ID NO: 41928 - protein, 18 aa, synthetic construct
CASSGTSSADRNTGELFF

SEQ ID NO: 41929 - protein, 15 aa, synthetic construct
CASSQVAGFPDTQYF

SEQ ID NO: 41930 - protein, 13 aa, synthetic construct
CSVEAANAYEQYF

SEQ ID NO: 41931 - protein, 17 aa, synthetic construct
CSATLLLAGGPANEQFF

SEQ ID NO: 41932 - protein, 14 aa, synthetic construct
CASSEAAVSYGYTF

SEQ ID NO: 41933 - protein, 21 aa, synthetic construct
CASTPGLQGPRLSLNYQPQHF

SEQ ID NO: 41934 - protein, 14 aa, synthetic construct
CASSLDRASYEQYF

SEQ ID NO: 41935 - protein, 15 aa, synthetic construct
CASSLRRGDYNEQFF

SEQ ID NO: 41936 - protein, 15 aa, synthetic construct
CASSLLRTGVYEQYF

SEQ ID NO: 41937 - protein, 15 aa, synthetic construct
CASSQDPWGINEQFF

SEQ ID NO: 41938 - protein, 14 aa, synthetic construct
CASSPTGVGSPLHF

SEQ ID NO: 41939 - protein, 14 aa, synthetic construct
CASSWLATDPEQFF

SEQ ID NO: 41940 - protein, 12 aa, synthetic construct
CASSSPGQPQHF

SEQ ID NO: 41941 - protein, 15 aa, synthetic construct
CASSQDPWGINEQFF

SEQ ID NO: 41942 - protein, 16 aa, synthetic construct
CASSLTGLATNEKLFF

SEQ ID NO: 41943 - protein, 16 aa, synthetic construct
CASSRRDSGIGNEQFF

SEQ ID NO: 41944 - protein, 17 aa, synthetic construct
CASSARTSGDPPDTQYF

SEQ ID NO: 41945 - protein, 15 aa, synthetic construct
CASSRGAAGNEKLFF

SEQ ID NO: 41946 - protein, 10 aa, synthetic construct
CASSAASYTF

SEQ ID NO: 41947 - protein, 17 aa, synthetic construct
CASSSPRDRATYNEQFF

SEQ ID NO: 41948 - protein, 16 aa, synthetic construct
CASSVASVTSTDTQYF